United States Patent Application Publication US 2005/0266459 A1 - sequence listing, part 6

SEQ ID NO: 93 - DNA, 156735 bp, Homo sapiens
gaattcagccactttctctgtcttgggtgcttgcttccccttctttctgccttggataatagcaggaggccctcagcagttatggccctttgatcttggacttctcggtctccagatctataagccaaataaatcccttgtctttataaattacccagtctgtggtatttctctacagcagtaggaaagaaattgaaagaaaacatggtgctgagagtggcgctgttgctacaacaaggacctgaaaatgtagaaacagctttggttaatggcaaatgggtaatggatagaggttggaagaattcggagaagcagacaagcaaaagcctagattgctgaaatagatcattaagggtaattctggtgaaggctcagggggaaatgaggaacaagatatcggaaatcaaagtaaatgctatccttgttgtaggtagcaaaaaccttggaaaaattgtgtcctgttctaggactttctggaataaaaatattatgagctattagctaggatatctactgaaggaaatatctaagcagctaagcattcaggctattgtggactactttcaggcaccaggaaatttaacccagcaagaaaggagccaagggaatagattttgcaaaccagcacagatggtgacactacctccctctgctgtcctgtctccaataagacaaactcgctctggagttagagaaaagaggagccagttaacataatacactggggtcagcttctgaaggcagggtggatctgaagggaataacataaactgtccagagcactacgtataggatgaccttgagggtgctgagtcccaagctggctaggtctgtgctatgagctgagaaggccctagaattatttctggggaatctgaactcttgataatttacagacaacacaggtctgctttgattctgatcagatggactaaatcttggggactctgcaccgctggccactcaggaaatgggttgggaatgttgcctgagacaggaaaatatgataagaaacatggtgtgaatctagcatcagaaagatgatgtgaggacagcaaggaagaactgcaacttgaggtttaatcacaggctcctcatcctcccctgatgggcaggtgtgtgagctccaggatggagtaccacagcactaggtgggagaagggtgatagggtggtggggctgcctgtgagctggggcagtgtaggtagaggagcaactgtatcaccacagaagcttctgccttcacacattcctccagctctgcaggacaggttgagtccagggtccgtagtgcgctagacttaaggaaggctgcatggggaggacacaggacagtgacatcacaggatacccctcccatcaggaaaatcaaggctcagaactcactgggttcttccccaggaggaccaagccctgaatcaggtgcagtgctgcctgccccactgtgccatgggccctgggctcctctgctgggtgctgctttgtctcctgggagcaggtgagtcctgggcacaggacagcagccccattctcagcttttccacccgtgtcctccactttaccatggagaagacctccaggctgtctcctgagctcatcctccatctgcttttcccacaggcccagtggacgctggagtcacccaaagtcccacacacctgatcaaaacgagaggacagcaagtgactctgagatgctctcctatctctgggcacaagagtgtgtcctggtaccaacaggtcctgggtcaggggccccagtttatctttcagtattatgagaaagaagagagaggaagaggaaacttccctgatcgattctcagctcgccagttccctaactatagctctgagctgaatgtgaacgccttgttgctgggggactcggccctgtatctctgtgccagcagcttggcacagcccggcagaatcactgacattctgtatataaacttcctgccgtaactttgacttgagagctgcaggccccacccaggtttcactccttcaagggaagcttttagttgcttggaaggcatgtcttgtgtcctactgagggcagacctttcccaaccaatagagcccaggtttcctgtgccctgagtgtgcctgcttctgtgctgcatcttcttgcagcttgtcccttcctgggtaacttcagtataagagtgactgctgagcgcttggtgtgtgctagatttttgtatatgttacatatcttaaagcttttccacaaccttgcaaatcaaacattctcatccttcctttacagatgggaggctcagggacattgagtcattttccccggtgtctcctggcttgtaaggatcagaagtgggaaacaaactagtccatccattttccacctacccccctgtttcatcaccaccttctgtatcctgttcagtaaaccagagccctcacactgccctctagtgaccagcagggccgcagcagaggctcagatgtcttcagggggttattactatggcctcctaattagcaattttgaggaatgttaaatttcacactttttaaaaaatcatttatatgcattccctttatctttcccatgtctgtagcttacattttcatttttatggtgttttttgatgtacaagagtttaatttaatgccacaaaaatgaaaaacaattttgtttgtgtgtagacaaaaacttctttctcatataaatgtctaaacatatttttcttaatttattctagtaaaatttaagtttggcttttctccattaagaagaaatgtacctgaaatatatctcacgtcagaaataacatagagacctaggaatgggagggaagcacatatgttcagtgaagaagcaacagcctgtcaaaaagatcccaaaatggacaccctgcgctgacggtggagaggtagctggagggtaaatgatcacgaactttatcaagctgttgttgttagaagagggacagccaggagcagagaccacatgggtgaaggtttatgacttgactctaggttgaaggttgcagcaggtagagggcggaattgcaggcagagggcagagtcactggctggcaggggcagtggcatcaccagtgactctactgacatccaggaattatgtccccaacacacaaagtgaaaaaactcccaacaatctgcacatttttccctggccctgctctggccaccagactcctcagtggtgtggccttttgcctcctgggggcaggtgagatctttaaagacttttccttggctcaccacatcctagcctaagcctttacatcaggtctgcattattggggtccctccttggtcactcaacttccttctatcatagacttcacagatgctggaacaacctgatcccaagataccagagaacaaaggcaggacgcgaagtgacatggagatgcctgagactgccatccatgaatacaggtgcagatgttaataggagccgaagctggtgcacagctgatctgtcccagcccacactacagagaaatccctgaatgtctttgacttcctctcaaagccaaatatgtggccttggtgtcagacagtctctcccagacctctgtgccctcttgcaccaggctttaccccacagccaccttcctctgcacacaaagttcagtggaagatataggtggccttgtctttacgagatcgtgatctgggcagtggaaaacattgtcccataggagtctccccaacactgcccaggctggggccttcagagctcggagcagctctgtgcatatgaaactctgccttgtgttgagcttctctgccaggccagtctcagctggacaaaggaacgcacatcaccatgatgtgagtagatgcagcctctcttccaggcccctcctgcagctctggcctcagaagtcctctttctcaattgctctcaggaaggaaagttcatttgaaattgtatatttgcagacagcattgacaacacaggtctacgtatgtccaatcccatcttccatttgtaacaaatacaaacactgtggtgtgcttcttttcacccctcttttctgtgttcatgcacacctttctacccaagtacacctacagaaattgggttcacctgtacactttactggccacatgcatactcttttctgttaatataccctggtcttattgttccagattggtcgatatagatctaacttgctcctattagctgcttcatattgcataatgagggtagacaggtacattcatgctctattgtctgagtcctaaattctgccaaatcttttctaaagtgactgaatgacctctttatgcttccaagttctcctcaccccagcacccagttgatgaatgcagcttttccatcactcataatcctagcaggtgtgagagctttatcagtttctcctgcatgaggagacagggagagataaaaggatagatgtttatcgaacctaccagagcctacacagtatctcagttcatcctcataaagcatggagaggaatgtgcgtcttgttttatagacgagtctagatgtggctagagtccaggaaggttaatgaatggcattgcccatggtctcagagctaataaatggtggagccagatggaggacagttggcttgcctctgtgtagaactgatagaggggtcactggagtttgagggaggtgaagtctagaaccatctggcgttgtcttcggatcagacgccagggggcagtagagtctgtgtaccctacagcactgaaggtaaaagtatcatggtgttggcagtggggaggtactagagtgggtatgtggttagtggccaggaaccagaagatctgaactttgaaaaaatttttcccatcacaagacgtagcagagacactgatgtggataatctaggccagagaactgtgtgacgagctgttcttaaaatgagggagggaggagaagcaactaagggtcacttcctctacatgaaatggagaggaaaacaatgttaactagaatctcatctgattttagtcagttttgctttgtaagtagttgcaaggtgggacaatttatttttgacattaagtaaacatctatacggcttctttaccttatgaagtctggtggtgaaggcaaaaatggtacggccaatggagtcacagtttgtttaataaataactcagagttcaaatggagactctcatgggccagaaattggtaaatgttcctgcattctaaaattaggaggatcttattttctttgaatcaacagagaaggaagcacaggcagtggggagggacagtagggaactcggcagagtggccacagaatgtggaagacaaaggacatgtaataccaaattctaagctgtgaagttgtgatgcaaccctcctccttctcctaatgtttttcaggtctcagcacagatgcacacctgagggagtaacttctttggaaatgaaggacaaatagctgtgtaataataagtccaccttacaaagcacaactggaaatggaaacaagattatttctaaggccttttctactctaagagtaacttagtagcaagctgagaggtgaggatggggggatgttcatccacacgcaatgagtaccatgaggctctaccatgaagcatatagtcctcagtgtgaatcagagccctaagaagaataatgccctttacattgctttgccctctgccatcctaaacccatcccacccataattaagcagccatggaaatgaagggagccagaaggaatcaaaccctgctgcttggttcagtagacagagggacctgggggcagggtgttggctgggtctaggagaagatgatgagctcagaaaatagacaaggagaaaccccaggggaaagcttgtaaaatcctggaggaatcacaagatatattatttgagctcctttttatttattactaaattaatggcaggaatcccatataaagggatattccttatgaaacatgacatctaaagtacaaacagaggattcttccttaccctaaatcctgccctctctccctgagtctcttacgcatcaggccacctttgtgcccataagtcatgggcaacgcagtgtggtcaccttcatccacacctagaggacagtcagcaaagtgaggtggttctgcctgctgcggtctcaccccagacatggaaagcaagagccctgggtggagctgaaggtgctcagctgggtttatcaggagtctcatctgtcagtggattgacaagaaacagagcaaaacgactcctccaatgttgatgagcctgcccctgggttttggaaacctgataacagagaaaaccaatatagacaaaggattttaaacaggattatggtcaattaagcaaattagaaaaagatacttgaaagaatatttgggacacaggagtcaaaaacaccaggaagacatgaggagtgtccctaagactctagactacagcactgtgtagacaactaacaccagaatattattatattatcgaagtaataaaatttacagtgaattacaaactgtttccaaaaggtcatgaaaatcttgtagacttgtttcaattcagacaaatgtgttcttctcattctcagctgttcactggtgcatttatcttgaatttgaccatctggggaatgggcgtggcctctcctgacaggaaggctctgggggccaggcagggagaatgatgtctcagaatgactcccttgagagtccagttcccctttcatcaatgcacagacccagaagacccctccgtcctgcagcccctgccatgagcctcgggctcctgtgctgtgtggccttttctctcctgtgggcaggtgggtcctgggcagggccccttgtgtggatatcaaggcccagcccctttccactggagctgtagcatcagctttgtccttccctgcaggtccaatgaatgctggtgtcactcagaccccaaaattccacgtcctgaagacaggacagagcatgactctgctgtgtgcccaggatatgaaccatgaatacatgtatcggtatcgacaagacccaggcaaggggctgaggctgatttactactcagttgctgctgctctcactgacaaaggagaagttcccaatggctacaatgtctccagatcaaacacagaggatttccccctcaagctggagtcagctgctccctctcagacttctgtttacttctgtgccagcagttactccacagcgctgcaaggctgtctcctctctgcacataaaggcaagggaaggtgctgccctcctcccccacccaagactcaaggatgccctgtgcagagatctctgcaccaggaaccttggaacccagagtggccccaagtggcccggacagtatgagcctcgctctgtgccacgtgcctctgcaggcatctcagccaggcctggactggtcccaggtcctcagatgtctcccttgttgctctctctggtctgtcctccgaggtctcctttcgggttgtggccagggcttccccagctcctacttttctactcatcatcctgagtccgaggcccccagggtggaagaggatttgtatttcagatccatctagactcctgtctcttcctggtgaccatgttgcttcctctctctagggttttcccagcccccaccctcacgtagtctctcctgtggcccacctttcccatctgggcagtcaccctccaaggccttgctgggtctctcctcccctcacttccccgcccctttctactgcagctataaggggagcctctcttctgtgcctccttccttcccatcaaagagatttcaaaggccattccctctgccctaggctagaggctaccttttctactggccagcgcctacctgtgcttcagatctcagcataatctgcccctcctgcaggaagcactcccccgcctcccagctgagatcaactttccactcaaaagctctcatagaatcatgtgtctgttggtaacctttagcacagttgggctttctcaggtacttgtctgataatttttgtactccacccattttttttccctatttttccttttttttttgagacagagtctcgctctgtcaccaggctggaatacagtggcactacctcggctcactgcaacctccgactctccgactctctggttcaagcgattctcctgcctcagcctcccaagtagctgggattacaggcacacaccaccacacccagctaattctttttggtatttttagtacagacagggactcaccatgttggtcaggatggtcccgatctcctgacctcatgatccacctgccaaggcctcccaaagtgctgggattacaggcatgagccactatgcccagactctccaccgaatttttaagcccatgagagctaaggctgtgcctgctgcatttaccaacatcggtgcctggcatgtggggagacccatttcacagagaatggatgagtgaatgacaggctgagtgagtgatgagtgggtggacgaaccaatagtaggaacatgctacacctactgtaacttggcagagatctagcattaagtacaagaaagcccacccctttgatttttgggctcaggttggtcttggaaattgatggggaatcactaccatggcggccacacctggctcaaggcttcctcttgtggctacaacacctgaactcctccaggtctctgtgctctccttcagggtctttccccacaacaaatccagacagatcagggatccacttctagaattccatccataaaggttgttccttgaaaccacctctagtaagaaaatctccattaggtttgcatcaataaaacagagccactacaaatttgacagtgtaaccgatttatgatcagaattagaccttatgcatatgtaggaggagctgagaaagagaaggtctggaggagagaagtcagaaagtgagggagccagtcagtagccagggctcatggagctctggcaggacaggctggagtggcagggacatgacaggatcagagcatgccaggccatgcagtgggaccttgacctgggagcacaggaaaaggccaaggaaatctgtgtctggggaagctgttccctctgtgtgggggccacccatgtacgtgcactgccaaacactgggggcagcctggctgcttttgggaagatgaactgtacacagggtgcagaaggaacaggacttccaaggtctattggatgcctctgtatctgctggccactgactctcactgtctgaccacagttatctgctatgtgtaatagtgactgttttacatctatcttccaaattttacacaaatgtatccttgaccatctctaacccagaatgataacagaaacgtcactctgggaaggcagactcctacctttgcaaagttgacttaacacaatccagcacaggatggattctcccagattaaggcatcagatcacacaactgtctcgacctgccatggtctgtggactcctctccaggggacacctgtgccgcccaggtgaatgtggacacaatttgtatgtagatgttccagacactggtgactaagttttctttaatcgtgtgcctgaactctcactccacccagaggcagggctctgcctcctgcttctgtctccttcctgagcttccgtcctgctggagttgcatggacatcagaaccctggtcagagtgcagcgacctgtggagacagtgggagggaagctcacctcttgctgtcttcctggacctagttcggttatacccaaagcaacttctctggtctccctttggactctgcagtatcagaaatgtgcttcatgaatttgtagctgatcagctcaatgatttgatggccaacccaaagtgaaatcctaagatctgcagaaattgccggcatttctgtgaagatggcaagaatactgtgtgctagagatgccttctctccatgtagagacctggccccaaaacaagacagagcagagagggccaaagagcccaaaacatgtctcagatggttgaagggcaatttcctaggacaatcctgctgacaaaatttcatccctcctattacacgcctgaccacccttctccccagatcagctgagtacccaggatatcacacatcccagcatcttctaacaagggaaaattcttcacatgccagccttcttcctgcaccacattgactaaccctggaaacttcgcctttccagaaaaaagctgtcttctcttggcccagtctagcccagtaggtttaattcatgatttatgtgaccttttaatttactcagaggagaacatatgatttcagagtaaagaatattcattttactttgtataagttggacctaaacagtaaactgagtacttctcttccatcagtgtcttaaattagacaacggtaaaacaaatctttgatgcaagaactttaggtcctggtgtttttcatatggaagatcccagctatccagtccagggcatggaatagatgagcgttaataagtcactctatgcctgagatggttttctattggcatcttttctgagttacagttaacaaaggtgggaaatgatcccagaagaaaggcacgagggcagttcttgagggaatccatgtgataggacagtcattgggcacgtgtgactgggggaatggaggaggctggagcatgaatggggatggcactggggaccctgacttgcaggaaatgcaatgagctcaccactttgtgccctatgttaggggcggtgttggtgcatcctagagtaaatgtccagcagacaaaggagcaagaagcggctgtgggatgacaaggataaactcagagatacagcatgagacctccgggtccagacagctctggagcccaaggcgatgagccatgcattgatgttgttaaaaaggagctgataaatatttaaagcagcacccaactgtgttctaatagaaatgctgtgatcctgaggtcctggggattgagagaggaagtgatgtcactgtgggaactgccctgtggagacaaggacatccctcatcctctgctgctgctcacagtgacactgatctggtaaagccctcatcctgtcctgaccctgccatgggcaccagtctcctatgctgggtggtcctgggtttcctagggacaggtgagtcctcagaacacaaagtagtttcatttttttttctgtgtgtaggcgtgtgggcgtgtgtgtgtgtgtgtgtgtgtgtgtgtgtgtgtgtgtgctgacgacaaatgttttccttattctgttgccaaattctatttccacagatcacacaggtgctggagtctcccagtctcccaggtacaaagtcacaaagaggggacaggatgtagctctcaggtgtgatccaatttcgggtcatgtatccctttattggtaccgacaggccctggggcagggcccagagtttctgacttacttcaattatgaagcccaacaagacaaatcagggctgcccaatgatcggttctctgcagagaggcctgagggatccatctccactctgacgatccagcgcacagagcagcgggactcggccatgtatcgctgtgccagcagcttagccacagtgtggcatagtcgcctccttcctgttcacaaacctcatccttctctctccttgcacctcctagagacccttaacagaggcctctctttgctcctcacttttgatgggaaagaagtagatttggacatcggctgtcctttgggtagaaagagaccacagattcattcctgaaacacagtgactgcaaatgtaggtggtgaaaacaatcacgtcccactgccctctaggagggctcggagccagctcactgctcgaaacagggagtgggtgtcttagccttggccttcagggcagacatgcatcttctataggtcttgggggctgctgtgctgcccacatacatgaggttgtcatgggcaggaaacatgcctctttttcatatgttggggcatctggaaggtctgaggctacatccccagtaacatctttcttctgaagcctcttctatccctgtcaccttggaagtttctgcaacaaaatatcaaacctctcttcctgtttgaagtaaaggtctgtgcaacttttgtggtccttacgtgataaaagcaatcatgataacaataagacttcatttcttctgtctactttaagccaagagtatccttcattttgtttccatttgccattgctgctgttctgatacacacaagcatgcattcaccactgctgccggttcaccttgattcgctcagcaaatctgattattagactctcgagtgttttcattgctgtcaaactcatttgatttgaaataagtttcctgaggccttgaactcaagaggtgttttacttataatattgaatctattcctttttaattttcacattatatattgttatatagtacttgttataaatagaagtacaatgattatattgcagtagaatcttccacctatctgtgggtgatgctgcagtttgtatccatgaaagtgaatgcactggtcagagatcatgtgatcatggatcatgggtttctgagagtcctcagggacaggccatttctccaagtgtggggactcggtgtcccagatgcaaccctgatagaggtgccctgagtctttcatagctaggaggggcatcatagtccttccaaattcactgatcagaaattgtggtggtacagacaccaaatttctttccccagagaatgatggtcactgaggtggagttgctctggacccattttttcttgtgtcatcatcaaatcgcttcttgctcaggtgccctgtgtctcctgggactgagtaaggccagcacacagatgggaattccctgtcttctgagaccttctctctaactgctgccactttcctctccgtgactcctgagacacctggtcctaacagtggacaagctgtgacactgaggctgaacagaacacagtccactgttgtaaatggcgctgcaagaacttgtagcaaaagtgagcagggcttccaatttatactgagaatgaacatgcaacaggagcaaggggcagatgtttctaatgaacaaataggaaggaatagggtttctgctttattgaaatcattctgttgtcttaagtaaagcaggagaaacatttcattgcaattactctaagtcaaaggctagcagctcccaaccaaccagcataactctttgctctgtgatctcggcagcttcagaggactcagaaatcctttctctgcacaaacatccctttgtccattccaagattcaggatcacacactgatcctatcatgaaaacaatgaggtgtgctatagttgctgtggcctcatttttagtgtgttgagcaggaagcattgaagaactttgaaagctttgctcttgagtctagggatgtgctggagccagcttgaatgactcagaagaaccaaataggcatactactcttcccagctcccctttcagtgaagccatgttggctgcttgaagtctgtcatggtgggtatgctggtacaccacaaattgggaaatgctaccagccatgcccccaccttcacagacacccagtatagcagcatatccctggggtattttctgatgtccctgttatgccatttcttgtggggccaaaagggctcagaattcacctcccctctactcctgctctgagaagccatcatctaagtgggcctcaattgtacctatttctattcgacctctaaattctcttgctctgtagctctgtgtctcctacaagcatgccagtctggaacatgacaactattttgaatgtaactaaaggtatcactgaaccagttcattatttgcaaattatctttccttgcatggaatattcagatgctggagtcattgggaacagagatggccaagcagcaactctgggttgtgaaccacatacagccccgctattcttctatgtcaccgacagaccctgaaacaaggactattttgctttggagactaagcagctccccaccagtcaggaatgactctgcttttactttaggctgagaggtcagaaggatcatgccctcagtattctcctctccaagacagagtgtggccactctccatctcagtccctggaagttgtccagagttccctgagaatccctgctctgggacagaatcaccaaggctcatcctcaccagctcccaacaggctccagcagggctttcctgccaggtgcagggcacaggaaatggctctgcctgtctcttagttagagggaggccatgcaatgatgtttgtataagagggactgggattctgggtctccattaaagtatttgataacattttctttgtttttgttttatttggccatctcaccaattaggacagcaatccctttacagttatattgttcttggcacttgggaaggtttttgtggttaagtcacattaagaaattgtgcctttttttcctgttcagatataacccaaggcagtgaaagaaacaacaataattttgaaagcagttacttatgcatcctatgataaaggtgttaagtttcattgcccacatctaactttcagtctagtggaaatgaaaagtcacagttagggggcatgtgagcatgccctgagagaggccgatgccaattgagaagtctgtgccaatccccaatactgtgagattgaaggggagggagagatgacctctctttcagaccatgctcaacaaggagggagagggattttcatccatgggaagctgaggaggagcaaatcccagggtcctctaactcagggtgcgggaacaaatccttggagaggaaaatggtccagttcagctgtcacaggagacaggagaaagcacagtcatctaatccacagtcccctggctgatttgcttccttatgatgctattttgtaccagcatgtcctcatctcccgctgctcctctgcctgtttcagaatcatctcttccgtgtttggtgctcagatcagtggatgtgcattgtacaagctgatcatttcctgtagcagcccctttgctagtcttagctatatccatccttagtttctacattaggtactgctccctccaccattgcttattgccttgtaagaggtttcattttatatatttcaattttactttttattaatagacatttgacttcatcttttgctgatctatacttttggggtaacattgtcattttaggaggatgtgtttgtttatctttagtgattcacattaaataatctctttatacctcaacgtctgtgttttcttactatttaaaaccaaatattattttctttcattcctctccttctattcctctttctttagatggtagtttaagggagaaaaagttaaactataactggagatatttgttaagagtttttcagaatgacggtgggatattaagattttggtaactgaaagcaatagtcagggttagaactagtgttggtatgatgatttagggaagctgctcataacacctgcgggacggcacttgtggaatattctgccggctcactcagcagacacttcccagcggaagaaataatgatgaaacttcacttattggccacaagatggcactatggtccactgggctctggggagtctgggcgagcagtctaggagggaaagggttaagaaaaattagggcttggatcccatattatgcagatgttgcagcagttttcagttattgctaggctacctacagctatgcaagaggcgggaagtccctgtaatctttagtgacatctacagttgaagaatttttgccttcgtatcaggggcgggtgcagaggagcaaatgcctcagaggaacattggaaattgtctgaccaggcaacagctttaacctgcttgagtgatctgggattctgcaagttcataagtcttactgataacatcaccttggctgagattccattggacaccaagtatgtgttctctggagggcaaaaaatattgagaagttctaaaacacctaagtaaacagactactgaaggaaaatgttagtagacacatcaaactgtgctgttagagctgaatataattgactagaagaattatcaaaaatagactataaataagtcactactaaagtatttgtgggcatagaacagtgtttgagtcttctcagggtagattaaggaagaaattcagctattatcctcatgaccttggcttggatgaaaatgcatggactcctcaatttattttcttgtaaaatgttacagaataatattgagcaaacattttatttttctccagcctctatccctctttagcacttacaggtagagcagacacctagacgcaaggttttttagttgggatccattaactgcaggactggagatccacagctgggctttacagggattgcaaaccccacatgcagggaaccccgtgtgtctgcgctgtgcccaactcccctctgtgaggctgccaaaggcggagggccgggtgtcccaggaccccactcacaaagaggggagcaggctgcttgctgggcaaaaaaatcacttcaccaattggccaatctgttgaaagccaaaaagaaatgaaagtctcaattgtgagactgatgaatgcccaatttcccaagttatgaaacggatagcagctcatggttctcagaatgatttcaacagcatatgaagatatttttagagagcttttgtttgtctacagctttccttgatattgatcctcacttgtttttcagcccactcatcacttgagcttattttgtggccaaatttcaatgttgtctatttcagtcactgagcacttctcacattctccaaatcttacacagctatgtgtgttcctgtcttttcttctttttgtgtgattcatttttaaattgggctgtgcagaatacaagcatacatttgtaaatgactcccatcttttatgcaatttagctgtttaatttttagtaatactttttattaaggtataattaatagagagtaaaacacaaatattaatagaaggacatcctggtacattttgacaaatgcatacgccagtgcaatagtaactgaaatgattataaaaaaaatttccgtcactcaagaaagtgtcatcatgctcctttctaatcaatttctatcccagggataaaaacttttctatgtgtatcactgttgagtagctttgtctattcttgagcttcatataatggaatcatatttttattgaattgtttttctccaaaattagtatttctgaagtatattcatatcgttgtatcagtaggtcattcttatgactaatattccattgcataaatatactacaacttgtttatccatgctcctgttgatggatatccatgttactcctgtcttcaactattatgaataaacttgttgtgaacatttttgtggaattcttcctgtggacatatgcattttttttaaagaaatagacttaagagtggaaatactgactcatagtgtagatgtgtgtgctatgcttgcatgtcctcacaaaatctcatgttgaaacttgtcaaggtaatggtattgggaggtgggacagctatgactagggtcatgagggatctgccctcagaaacagatcaatgccctttattgtgggagtgaattaattatcttgggaatggtcttctgataaaaaggatgaattcagtcattttctctgacttcggtgcttgcttccccttccttctgccttggataacagcaggaggccctcagcagttattgcccttctatcttggacttctcagtctccagatctataagccaaataaaactattgtctttataaattgcccattccatggtatttctctatagcagtaggaaagaaattgaaagaaaatatggtacctgagagtgaggctgttgctataatacctgaaaatgtagaagcagctttggttaatgggaagtggctaatggatagaggctgaaagaattgggaggagcagactagcaaaagtctagattcctgaaaacagagcataaagggcaattctggtgaaggctcagggggaaatgaggaacaaggtattgaaaatcgaagtaaatgccatccttgttgtaagtagcaaaaaccttggcaaaattgtgtcctgttctagaactttatggaatataaaaattatgagccatttgctagtatatctgctgaaagaaatatctaagaggcaaagcattcaggctactgtgtgactacttttagccaccaggaaatttaacccagcaagaagggagccatgggaatagattttgcaaaccagcacagatggtgactctacctccctctgctgtcctgtctcccataagccaaactctgtgctgtgagctgttaaagtccaagaattatttctggggaatctgtactcttaataatttacagacaacacaggtctgctttggatctgatcagacagactaaatcttggggactgtaccagtggccactgagaaaaggggctcggaatgttgtcttggatagaaaaatataataagaaacattggtgtgaatctagcatcagaaagatgacgtgaggacagcaaggaagagctggaaactgaggtttactcacaggctcctcaccctccgctgatgggcaggtgtgtgagctccagcatggagcaccacagcactaggtgggagaacggtgatagggtgatggggcagcctgtgagctggggcagtgtaggcagaggaggaactgtatcaccacagaaacttctgccttcacacatccctccagctaggcaggacaggtagagagtccagtgtcctggagcactagacctaaggaaggctgcatggggaggacaaaggacagtgacatcacaggatacccctcccatcaggaaaatcaaggcccagaactcactcggctcttccccaggagaaccaagccctgaatcagatgcagtgcttcctgtccctctgtgccatgggccccgggctcctctgctgggcactgctttgtctcctgggagcaggtgagtcctgggcacaggacagcagccccattctcagctttcccacccctgtgtcctccactttaccttggggaggacctccaggctgtccctgtgctcatcctccatctgcttttcccacaggcttagtggacgctggagtcacccaaagtcccacacacctgatcaaaacgagaggacagcaagtgactctgagatgctctcctaagtctgggcatgacactgtgtcctggtaccaacaggccctgggtcaggggccccagtttatctttcagtattatgaggaggaagagagacagagaggcaacttccctgatcgattctcaggtcaccagttccctaactatagctctgagctgaatgtgaacgccttgttgctgggggactcggccctctatctctgtgccagcagcttggcacagcccatcagagtcactgacgttctgtatataaacttcctgccttagctttgccttgagagctgcaggccccacccagatttcactccttcaagggaagcttttagttgtttggaaggcatgtcttgtgtcctactgagggcagagctctcccaaccaataaagcccaagtttcctgtgtcctgagtgtgcccacttctgtgctgcatcttcttgcagcttgtcacctcagtacaagagtgactgctgagccccagatgtgtgcttgattatttgcatttcttacatagcttaatgcctttcaacaatcttgcacatcaaacattcttattcttcctttacagatagaaggctcagggacattgagtcattttccccaatgtctcttggcttgtaaggatcagaagtaggaaacaaactagtccatccattttccacctacccccctgctccatcatcatcttctgcatcctggtcagtaaatcagagccctcacactgccgtctagtgaccagcagggccgcagtagaggctgaaatgtcttcaggggtcattactatgtccttttcattagctcctttgaggaatgttaaatttcacacattttaacaatcatttatatgcattccctttgtctttccccagtctgcagcttatattttcatttttatggagtttttggtgcacaagagcttaatttaatgcaacaaaaactaaaaacaattttgtttgtgtgtagacaaaaaccactttttcatataaatgtctaagcatatttttctcaacttattctactaaaatttaagtttggattttcaccactaagaataaatgtacctgaaatacatctcatgtaagaaataagatacagacctaggaatgggagggaaggacatatattcagtgaagaaacaatagcttgtcaaaaagagccctaagtggacacctggagctgacggtggagaggtaggtggagggcaaatgagcatgaactttgtcagtctattgtcttgtagaagaaagacagccaggagcagagaccatatgggtgaaggtttatgacttgactgtaggttgaaggttgcagcaggtagagggagaattgcaggcagagggcagagtcactggctggcaggggcagtggcatcatcagttgactctactgacatctaggatttatgtccccaacacacaagctgaaaaacctccccacaatttccccatttttccctgaccctaccatgaccaccagactcctcagtggtgtggccttttgcctacttggggcaggtaagatctttaaagccttttccttggctcaccacatcccagcttaagcctttacctcaggtctccattattggggtccctccttgggcactcatcttccttctatcataaacctcacagaagctgggacaatcaaatccttaagataccagagaacaaaggcagtacatgaagtggcacggagatgcctgagactgtcatccatgactacatgtgtaggtgttaataggagctgaacctggtgtacagctgatctgtcccagcccgcaatacagagaaatccctgagggtctgtgactttctctcaaagccaaatatgtggcctttgtgtcagcctctcccagacctctgtgccctcttgcaccagcagtcaccccacagccaccttcctctgcacacaatgttcagtggaagatataggtggccttgtcttcacgagaccatgttctaggcagtggaagacgttttcccataggagtctccccaacactgcccaggctggggccctcagatttctgagcatccctgtgcatgggaaactctgccctgtgttgagcttctctcccaggccagtctcagctggacgagggaacgcacatcacagtgatgtgagcagttgccgcctctctcccaggcccctcctccagctctggcctcagaagtcctcttcttcacttgctctcagaaaggaaagttcatttgaaattgtatatttgcagacagcattgacaacttttccccgtcggccttcacaactccatcttccccacaccatgctcatgtcagtcctcagcctcctccacatgatgtctgctcccagctgtcctctccctctgcaccttcacctccacgtcaaccacagatgcctcagttcaggacattcctcatgcatcatgctcctcccaccaaaggcctttccactccatgctgtattctctgtgtcaacacaagtctcttcttctttgttcttgctccaactgtcagtttatctacaaccatctctagggagacactccttcaacagttttcctaggctgcacctccttattgtaaatgctcacagcttataatatgtattaaaattcatagatttagcaccatagtcattttccatgactttgtgtgactatttaattgacactactcttgcattctagactgtaacatgcatcattttacaaattgtggatgttttgttccccattttattgtcaggaccaacagcagttccaatcttgaaactggccaatcttgaaaaatgaagagcagatattgaaaggccgtctgagtacccacttagatgtctggacgcattaaatcggaacctctatcccttcatctcctaggatcaaatgagtcctggaaacagatgagaaatccctgtcatggataagtaactggatccaagcctttctgcacgactgaatttcctatctgccctatcgccttcctgcctaatctcctccttcaatctccttccctcacaggtgtcctggatttgggagtctcacagacacagcgcacctaatcactctgagagagtgatcagaaacataatgtcaaacactgacattaaaaggtcatggagaagaaaacaaatggcttccccatgctcttatggagagttttcccaaggcacaaatatctctttgggtggctttgaggtcatggtgcctgacacactgagcgatattatgggtgtccatttccatgaattggtgggcaatgtcagagacacagagttcatggtcaccagcttcctccagcccacacctgattttggtgcagggcgctgagcagagacctttgcttgttaccctcctttgccagttaggaaaggctgattgagaggcagaggctccatttacagagcagggctatgtgttagtccctgaagaattgtgagagccattctgggtggaaataatcaaatatacaatccccaagaatggcccacggatagacagaagtcccaattttgccagaatgatttgcatctatgctttgaagacaaatgcagttttatctctttaggcaataaagaccaaaaatagactagttattttaaataattgaaccttaaacagaccaaagtcagaacatcttccctagggacagcattttcttccacccactcactaaagctgtatttgagaaagcagtgtgctgttgataaacgctggaatatcgttacaatcgacattgtaataatactgctacttggatcagaaacaaagagcatttctaaagcttgaacaatgtaaaactggaaacgagctctcactgagtttggaaatgcaggcactagagggtgctcatttctcttccttttccaatcgggggctattcaaaggctgttctagaacaaggggtgagatcctccacttccccgtggtgatcaggctttcacaggtagaagccttattagttcataatcagccaagctgacctcaccatcaaatgtatcgacctcgatgctcaccctcctcagcagtcagagactggctgtgttcaccaggagctcgtgtgtttttacggagcacactttctcctcggtttattaaaaacaaatgagcctttatacggggttccataaacagaagctttctgtactttgcccatttagacactgcaaattctgatgcctgatgaaaagtgtaaacttaaagcttgcatgtcgttaagattttttaataaccaatttaaataatatatataatgaaaatgtcaataatgctctcgaatccaatcccatgttccattggtaaccaatattaacgctctggtgtgcttcttttcacccctcttttctgtgttcatgcacacctttctacccaagtacacctacagaaaatgggttcacctgtacactttaactgccaaatgtgtactcttttctgtatatcttggtctttattgttccagattggttgatatagatctaacttgctcctattatctgcttcatattgcataatgagggtagacaggtacattcatgctgtattgtctgtttcctaaattctgccagatcttttctaaagtgaccaaatggcatctttacgcttccaggttctcctcaccccagcacccagttgatgattccagcttttccatcactcatagtcctggcaggtctgagagctccatttggtttctcctgcatgaggagacagggagggataaaaggatagacctttatcaaacctaccagagactacatggtatctcagttcatcctcataaagcattgaggggaatgctagtcttgttttatagatgagtctagatgaggctagagtccaggaaatcaataaatagccttgcccatggtctcagagctaataaatggtggaggcagatgaagggcagtcggcttgcttccatgtggaattgatagaggggtcactggagtttgagggaggggaagtctagaaccatctggcgttgtcttcagatcggacaccagggttgagacagtctgtgtaccctatagcaccgcaggtacaagcatcatggtgttggcagtggggagatactagagtgggtaagtgattagtggcctggaactggaagatctgagctttgacaaaattattcccatcacaacatgtagcagagacactgatgtggataaactaggtcagggagctgtgtgaggagctgttgttaaaataagggagggaggagaagcaactaagtggtcacttcctaacatgaaatgtagaggaaaccaatattaactagaatccatctgattttagtcagttttcctttgtaagtatttggaaggtgggataatttattttcaaggttaagtaaacatctatacatctcctttatcttttgaagactggtggcgaagcgaaaaatggcacggccaatggagtcagagtttgtttaataaatatctcagagttcaaagagagactctcatgggccagaaattggtaaatgttcctgcattctaaaattaggaggatcttattttctttgaatcaacagagaaggaagcacaggcagtggggaggaacagttgggaacacggcagagtggccgcaggatgtcaaagacaaaggacatgtaatatcaaattctaagctgtgaagctgtgatgcaaccctccaccttctcctaatggattttttaggtctcagcgcagatgcacagctgagggagtaatttctttggaaatgaaggacaaatagctgtgttaaatattaataacaagtccacattacaaagcacgcctggaaatggaaacaagattatttctaaggccttttctactctaagagtctctaacttggtggcaaggtgagaggtgaggttggggtgggtgttgatccacacgcgatgagtaccatgaggctctaccatgaagcatgtagttctcagtgtgaatcagagccctaagaagaataatgccctttactttgttttgtcctgtgccatcccaaacccactccacccataattaagcagccatggaaatgagggtagccagaaggaatcaaaccctgctgcttggttcagtagacacagggacctgggaggagggtgttggctgggtcaaggagaagatgatgagctcagaaaatagacaaggagaaaccccagtggaaagcttgtaaaactctggatgaatcacaagatatgttattagagctcctttttattactaaattttatttattactaaattaatggcaggaaccctgcacaaagggatattccctatgaaagatggcatctcaaataaaaacagagcattcttccttaccctaaagtctgccctttctccccaagtccctcatgcatcaggccacctttgtgcccacagatcatgggcagcgctgggtggccatcatcatccacacagagagggcagtcagcagcatgagctggttctgcctgatatggtctcaccctaggcatggaaagcaagagacctgcgttgagctgaaggtgctcagctgggtttgtcaggagtcccatctgtcagtgaattgacaagaaacagagcaaaacgactcctgcaatgttgagaagcctgcacctaggatctggaaacttgataacagagaaaaccaatatagacaaaggattttaaacaggattatggtcaattaagcaaattagaaaaggatacttgaaggagtatttgggatacaggaatcaaaaacaccaggaagacatgagaagtttccctaagagtctagactacagcactgtgtagataactaacatcagaatattaattatattattgaagaattaaaatttacattgaattacaaactctttacaaaaggtcatgaaaatcttgtagacttgtttcaattcagacaaatgtgttcttctcattctcagctgttcactggtgcatttatcttgaatttgaccatctggggaatggcgtggcctctcctgactggaaggctctggggcccaggcagggagaatgatgtctcagaatgactcccttgagagtcctgttccccttttatcaatgcacagacccagaagacccctccgtcctgcagcccctgccatgagcctcgggctcctgtgctgtgcggccttttctctcctgtgggcaggtgggtcctgggcagggcccttgcgtggatttcaaggcccatcccctttccactggggctgcagcatcagttttgttcttctctgcaggtcccgtgaatgctggtgtcactcagaccccaaaattccacatcctgaagacaggacagagcatgacactgcagtgtgcccaggatatgaaccatggatacatgtcctggtatcgacaagacccaggcatggggctgagactgatttactactcagctgctgctggtactactgacaaagaagtccccaatggctacaatgtctctagattaaacacagaggatttcccactcaggctggtgtcggctgctccctcccagacatctgtgtacttgtgtgccagcagttactccacagcgctacaaggttgtctcctctctgcacataaaggcagggaggctctgccctccaccccgacctgagactcagggatgacctgggcagagtattctgcaacgggaaccttggaacccgaagtggccccaagtggcccagacagtatgagcctcgctctgtgccaggtgcctctgtaggcatctcagccaggcctggactggtcccaggtcctcatatgtctcctttgttgctctctcctacaagctctacttttggggttggggccagggcttccccagctcctacttttctactcatcatcctgagtccaaggcccccaggatgaaacaggatttgtatttcagatccatctagactcctgtctctccctggtgaccatgttgcttcctctctagggtttcccccagcccccaccctcctgtggcccacctttcccacctccgcagtcatcctccaccccccacttccctgcccctctctactgcagccatgaggggagcacctctctgtgactccttccttcccgtcacagagacttcaaaggccattttctttgccctgggccagagccttcctttctctagtggccagctccttcctgtgcttcagatctcagtatgatcagcccctctgcgggaagcactccctcccctcccaggtaagatcaactttcctctcataagctctcaatgaatcatatgtctgttagcaacctttagcacagttgggctttctcagatgcttgtctgattatttttgtgctccacccaatttttttttttttaagacacagtctcactccgtcaccaggctggagtgcagtggcatgatctctgctcactgcaacctctgatactctgattcaagtgattctcctgcctcagcctcccgagtagctgggattacagacatgtgccaccacgcccagctaattcttgtttgtatttttagtagagatggggttttaccatgttggccaggatggtctcgatctcctggcctcatgatctgcccttctcggcctcccaaagtgtggggatacaggcgttagcagcacgcctggcctctccacccaatttttaagcccatgggagctaagactgtgcctgctgtatttaccaacatcggtgcctggcatgtggggagacccatttcacagagaatagatgagtgaatgacaggctgagtgagtgatgagtgggtggacgaacaaatagcaggaacacgctacatctactgtaacctgccagagatctagcattaagtacaagaaagcccacctctttgattgctgggctcaggtcggtcttggaaattgatggggaatcactatcatggcggccacacctggttcaaggcttcctcttgtggctgcagcacctgacctcctccaggtctctgtgctctccttcaggatctttccccacaacaaatctagacagatcagagatccacttcaagaattccatccttaaaggttgttccttgaaaccacttctggtaagaaaatctccattaggtttgcatcaataaaacagagccactacaggtttgtgagtgtaaaagatttatgatcagaattagactttatgcatatgtgggaggagctgaggaagacaaggtcttgaggagagaagtcagaaggtgagggagccagtcagtagccagggctcctggagctcgggcaggacaggctggagtggcagggacatgagaggatcagagcatgccaggccatgcagtgggaccttgagccgggagcacaggaaaaggccgaggaaacctgcttctggggaagctgttccctctgtgtgggggccatgctgcgggtatagtgccaaacactgggggcagcctggctgctgttgggcagcatttggcaagatgaactggacacagggtgcagaaggaacaggacttcctaggtctgttggatgcctctgtatctgctggtcactgactctcactctctcaccacaatgacctgccaattgttatagtgactgttttgtatctgtcttctaaatgttacaaaatgtatccttgaccatctctaacccagaatgataaatggcattctgggaaagtcagactcttacatttgcaaagttgacttaacacaatccagcacagtatggattctcccagattaaggcatcagatcacacaactgactcaacctgccacggtccgtggactcctctccgggggacacctgtgctgcccaagtgaatgtggacacaatttgtatgtagatgttccagacactggctactaaattttcttttaatcctgtgcctgaaatctcgctccacccagaggcagggctctgcctcctgcttctgtctccttcctgagcttctatcctgatggagttggatggacatcagacgcctggtcagagtgcagtgacctgtggagacagtaggagggaagctcacatcttgctgccttcctccatccagttcttttataaccaaagcaagtgttctggtctcccttttgactgtgcagtatgagaaatgtgcttcatgaatttgtagctgatcagctcaatgatttgatggccaacctaaagtgaaatcctcagatctgcagaaattgccctgcatttctgtgaagatggcaagaatacagtgtgctagagttgccttctctccaagtagagacctggcccccaaacaggatggagcagagggggccaaagagcccaaaacatgtctcagattgttgaaaggcaatttcccaggacaatcctactgatgacatttcatcccttgtattacacacttggccacccttccccccagatcagctgagtacccaggatatcacacatcccagcatcttctaacgaggaaaaatacttcacgtaccagcctccttcctgcaccacattgactaaccctggaaacttagcctttccagaaaaaagctctgtcttctcttggcccagtctagcctggtaggtttaattcatgatttatgtgaccttttaatttactcaaaggagaacgtatgatttcagggtaaagaatattcattttatttttataagttggacctaaacagtaaactgagtacttttcttccatcagcgtcttaaattagacaacggtaaaacaaatctttgatgctagaacttcagatcctagtgtttttcacatggaagttcccagttacccagtctagggcatggaatagatgagcattaataagtcactgtatgcctgagatggttttctatgggcatcttttctgaattacggttaacaagggtgggaaatgatcccagaagaaaggcatgagggcagttcttgagggaacccatgtgatgggacagtctcattgggcacgtgtgactgggggaatggaggaagctggggcatgattgggatggcacaggggaccctgacttgcgggaaagacaatgagctcaaccctttgtgcccctatgttaggggcgctgttgttgcatcctacaggacatgcccagcaggcaggggagcggctgtaggatgagaagatgaactcagagatgcagtgtgaggtctccaggcacagacggctctggagcacaaaccaatgagccatgaattgatgttgttaaaacggaggttataaatatttaaagtgtcacccaagtgtgttctaatagaaatgctgtgaccctgaggtcctgaggattgagagaggaagtgatgtcactgtgggaactgccctgtggagacaaggacatccctcatcctccgctcctgctcacagtgacactgatctggtaaagcccccatcctggtctgacactgtcatgggtaccagtctcctatgctgggtggtcctgggtttcctagggacaggtgagtcctcaaaacacaaagtagtttcatattttttctgtatgtaggtgtgtgtgtgtatgcatgtgtgtctgtgtgtgtgtgtgtgtgtgtgtgtgtgtgtgagatgactacaaatgttttccttattctgttgccagattctgtttccacagatcacacaggtgctggagtctcccagtctcccaggtacaaagtcacaaagaggggacaggatgtaactctcaggtgtgatccaatttcgagtcatgcaaccctttattggtatcaacaggccctggggcagggcccagagtttctgacttacttcaattatgaagctcaaccagacaaatcagggctgcccagtgatcggttctctgcagagaggcctgagggatccatctccactctgacgattcagcgcacagagcagcgggactcagccatgtatcgctgtgccagcagcttagccacagcatggcacagtcgcctccttcctgttcacaaacctcatccttctctctctttgcagctcccagagatcattaacagaggcctctctttgctcctcacttttcctgggaaagaggtagatttggacctcggttgtcctttgggtggaaagagaccacagattcattcctgaaacacagtgactgcaaatgtaagtggtgaaaacaatcacgtcccactgcactctaggagggctcggagccagctcactgctccaaacaaggagtgggtgtcttagccttggccttcagagcagacatgcatcttctataggtcttggaggctgctgtgttgcccacatacatgaggttgtcataggcaggaaacatgcctcttcttcatatgttggggcatctggaaggtctgaggctacatccccgagaagatctttcttctgaagcctcttctatccctgtcaccttggaagttttctgccacaaaatatcaaacctctcttcctgtttgaagtaaaggtctttgcaaatttgtggtccttacttgataaatacaatcatggtaacaataacacttcatttcttctgcctactttaagccaagagtatcctttattttatttccatttgccattgctgctgtcctgatagacagaagcatgcatcaccaccgctgccacttcaccttgattcactcaggaaatctgattttcagactctgagtgttttgattgttgtccaactcatttgatttgaaataattctcccaaggcctttaactcaaaaagtgttttatttataatattgaatctattcctttttattatattttttcataatatatagtgttatatagcacttgttagaaatagaagtacaatgattatattgcaatagaatcttccatctgtctgtgggtgatgctgcagtttgtatctatgaaatggaatgcactggtcagagctgatgtgattatgcattatgggtttcggggagtcctcagcgacagaccacttctccaagtctgggactcagtgtcccagatgcaaccctgatagaggtgccctgaatctttcatagctaggaggggcatcatagtccttccaaattcactgatcagaaattatggtgtggtacagacaccaaatttctttccccagagaatgatggtcactggcagggaattgctcttgacccattttttcttgtgtcgtcatcaaatgactccttgctcagccgccctgtgtcttctgggactgagtaaggccagcacacagatgggaattccctgtcttctgagaccttctaactgctgccactttcctccatgtgactgctgagacaactggtcctaacagtggacaagctctgacactgaggctgaacagaccacagtccactgttgtaaatggtgctgcaagaacatgtaacaaaagtgagcagggcttccaatttatagagagaatgaacatgcaagaggagcaaagggtagatggtactaacgaacaaatagggaggaatgtggtttctgttctaatgaaatcattctgttgtcttaagttaagcaggagaaacatttcattgcaattacttcaagtcaaaggctagcggctccccaaccagccagcataactctttgctctgtgatctcagcagcttcagaggactcagaaatcctttctctgcacaaacatcccgttgtccattccaagacccaggatcacacactctgatcttatcatgaaaataatgaggtatgctatagttgctgtggcctcattttagtatgtttagtaggaagcattgaagaagtttgaagcttttctctttagtctatggcttgtatgactcaaaagaagtaaataggcatacttttcccagctccctgttcagtgaagccatgctgggagcttgaaatctgccatggtgggtatgttggtacacagaaattaggaaatgctaccagccatgcccccaccttcacagacacacagtttatcagcacattactggggtattttctgatgtccctcttatgccatttctgagctaggccaatatagctcagaatttatttccccactactcttgttcttagaacccatcacctaaggggccgtcaattgttcctatttccattcaactcccaaattctcttgcactgtagctctgtgtttccttcaagaatgccagtctggaacatgacaactattttgaatgtacctaaaggtatcactgaaccagttcattatttacaaattatctttcctcacatggaatattcagatgctggagtcattgggaacagagatggccaagcagcaactctgggttgtgaaccacatagagccccgctattcttctatgtcactgacagaccctgaaacaaggactattttgctttagaaactaagcagctccacaccagtcaggaatgactctgcttttactttaggctgagagatcagaaggatcacatcctcagtattctcctctcctggactgagtgtggccactctccatctcagtccctggaagttgtccagagttccctgagaatccctgctctggggcagaatcaccaaggctcatcctcaccagctccccacaggctccagcagggctttcctgccaggtgtagggcacaggaatggctctgtctgtctctcaggtagagggaggccaaacagtgatgtttgtataagagggactgggtttctgtgtctccattaaagtatttgacaatattttctttgttttttttttttttttggtttatttttccatctcgccaatgaggagagcaatcccttggtagttatattgtttttggcacttgggaaggtttttgtggttaagtcacattaagaaattgtgcctttttttcctgttcagctgtaacccaaggcagtgaaagaaacagcaataattttgaaagcagttacttgtgtatcttatgataaaggtgttaagtttcattgcccacatctaactttcagtctagtggaaatgaaaaggcacagttagggggcatgtgagcatgccatgagagaggtcaatgccaattgagaagtctgtgccaatccccagtactgtgggattgaaggggagggagagatgacctctccttcagaccatggtcaacaaggaaggagagggagttcatccatgggaacctgaaaagcagcaaatcccaggggcatctaacttcaggtgcaggagcaaatccttggagaggaaaatggtccagttcagctgtcacgggagacaggagaaagcaaagtcatctaatccacagtcccctggctgatttgcttccttatgatactattttgcatcagcgtgtcctcatctcccgctgctcctctgcctcttccagtgtcatctcttccctgtttgctgctcagatcagtggatgtgcattgtacaaggtgatcatttcctatagcagtccctttgctactcttagttatatccatccttattttctgcattaggtactgctccctccaccattgcttattgtcttgtaacaggtctcgttttatatatttcaattttactttttattaatagacatttgacttcatcttttgctgatctatacttttggggtaacattgtcatttttggaggatgtttttgtttatctttagtgattcagattaaataatctctttatacttcaacgtctgtgtcttcttactatttaaaaccaaatattatttcctttcattcctctcattctgttcctctttctttagatggtagttttaagggagaaaaagtttggctataactgaagctatgtgataagagttattcagaatgagggtgggatatcaagattggtaactcaaagcaataattagggttagaactaatgtaggacttagggtttagggaagctgctcataaaactgcgggatggcacctctggaatattctggcagctcactctgcagacacttcccagcattccttgggccattacagaattaaacaatgatgaagcttcacttattggccacaagatggcagtgtggtccactgcgaatgtaaagggctctgggcagtctgggggagcagcctaggagggaaaaggttaagaaaaattagggtttgtattcaatattatgcagatgttgcaggagttttcagttattgctaggctacctacagctatgcaagaggcaggaagtccctctaatctttaatcagatctacagttgaagaattttggccaggcagccttggtgtcggggcatgtgcagacagaggagcaactgcctcagaggaaaagggaaaagtgagaggcaggctgtgccctgagcccagtgggtctctgctgcacctcatcttccctgcaggtctggccaggcaacagctttaacctgcttgagtgatctgggattctccaagttcataagtcttactgataacatcaacttggctgaggttccattggaaatcaagcacatgttctctggaggacaaaaagtattgacaaaaatttctgaaacacctcagtaaacaaactattgaaggaaaatattagtagatgcaccaaactgtgccgttagagatgaagataatagactagtagaattttacaaaggagactataaataagtctctactaagtatttgtgggcatcaagcagtgtctgagtcctctcagggtagattaaggaaggaattcagctattatcatgactttggcttggatgaaaatccatgaagtcctcaattgattttcttgtaaaatattacagaataatattgagcaaacattttatttttctccagcctgtatccctctttagcactaacaggtaaagcagacacctagaggcacggtttctttagttgggatccattaactgtaggactgggaggtccatagctgggcttcacagggagttcaaaccccacgtgcagggaactccgtgtgtctgtgctgtgcccaactcccgtctgtgaggctgaaaagggggagtgccgggtctcccagtaccccactcacaaagtggggagcaggctgcttgctgggcaaaaaaatcaattcaaaaattggccaatctgttcaaagccaaaatgaaaggaaagtctgaattgtgagactgatgaatgcccaatttcccaagttatgaaatttgtagcagctcatggttctcagaatgatttcaatagcatatgaagatattgtaaaaagcttttgtttgtctacagctttccttgattttgatcctagttgtttttcggcccactcatcagttgagcttattttgatgccaaatttcaatgttgccacttcagtcaccaagcacttctcacattctccataacttacacagatatgtgtgttcctgtcttttcttatttttgtgtgattcatttttaaattgggctgtgcagaatacaagcatacatttgtaagtgaatcccatattttatgatttagctgtttactttttagtaatactttttattaaagtataatagagagtaaaacagaaatattaatacaaggacatcctggtacattttgacaaatgcatatgccagtgcaatagtaactgaaatgattataaaaaaaattctgtcatgcaggaaagtgtcgtcatgctcctttccaatcaatttctatcccagagataaaaattgtatttatttatttatttagagacaagagtctcactctgtcacccaggctggagtgcagtggtgtgatctcagctcactgcaagctctgcctccccggttcacgccactctcctgcctcagcctttggagtagatgggactatagatgcttgccaccacacccggctaattgtttgtatttttagcagagacggggtttcatcgtgttagtcaggatggtctcgatctcctgaccttgaaatctgcccgcctcagcctcccaaatttttgggattacaggcatgagccaccgcgcctggccaaaacttttcttatttttatcaccactgactagcttggtctattcttgaactccatataaatggaatcatataacattttattgagttattttcctccaaaattagtatttctgaagtttattcatattgttgtatcagtaggtcattttttcttatgactaatattccattgcataactataccacaacttgtttatccatgctcccgttgatggatatccacattactcctgtcttcaactattatgaatacagttgttgtgaacattcttgtggaactctttcttgtggacatatacattctttttttttattttattttaggtataaacttaagagtggaaatactgacttacagtgtagatgtgtgtgctatgcttgcgtgtcctcacaaaagctcatgttgaaatttgtcattgtaatggtattgggaggtgggacagctatgactaggtcatgagggatctgccctcagaaagagatcaatgccgttattgtgggagtgaattagttgtcttgggaatggtcttctgataaaaagtataaattcagccactttctctgtcttgggtgcttgcttccccttccttctgccttggataacagcaggaggccctcagccgctatggcccattgatcttggacttcccagtctccagatctataagccaaataaatgccttgtctttataaattacccagtctgtggtatttctctatagcagtaggaaataaatggaaagaaaacatggtgctgagagtgacgctgttgctgtaacaagtacctgaaaatgtagaaacagctttagttaatgggaaatggctaatggatagaggttggaagaattcagagaagcagactagcaaaagcctagattgctgaaaacagagcattaagggcatttctggtgaaagctcagggggaaatgaggaacaaggtatcagaaattgaagtaaatgccatccttctcataagtagcaaaaaccttggcaacattgtgtcctgttctaggactttatggaatataaaattatgagccattagctaggatatctgctgaaagaaatatctaagctgcaaagcattcaggccactgtgtgactacttttaggcaccaggcaatttaacccagcaagaaggcagccaagggaatagattttgcaaaccagcacagatggtgacactacctccctctgctgtcctgtctcccataagccaaactcactctgaagttagagaaaagaggagacagttaacatgatacactggagtcagcctgtgaaggcagggtggatctggagggattaacataaactttccagagcactacatataggatggccttgagggtgttgagtccaaagctggctaggtctgtggtgtgagctgataaggccctagatttatttctggggaatctgcactcttaataatttacagacaacacaggtctgctttggatctgatcagatggactaaatcttggggcctctgtaccgctggccactcaggaaatgggttgggaatgttgcctgggacaggaaaatatagtaagaaaccttggtgtgaatctagcttcagaaagatgatgtgaggagagcaaggaagagctggaaactgatggtttaatcacaggctcctcaccatctgctgataggcaggtgtgcgagctccagcatggagcaccgcagcactaggtcagaggagggtgatagggtgatggggcagcctgtgagctggggcagttaggcagaggagcaactgtatcaccacagaagcttctgccttcacccatccctccagctcggcaggacaggtagagagtccagtgtccgtggagcactagacctaaggaaggctgcatagggaagacacaagacagtgacatcacagcatacccctcccatcaggaaaatcaaggcccagaactcactcagctctttcccaggaggaccaagccctgaatcaggtgcagtgctgcctgccccactgtgccatgggccccgggctcctctgctgggtgctgctttgtcccctaggagaaggtgagtcccgggcacaggacagctgctccattctcagctttcccacccctgtgtcctccactttaccttggggaggacctccaggctgtctccagtgctcattatacatctgcttttcccacaggcccagtggacgctggagtcacccaaagtcccacacacctgatcaaaacgagaggacagcacgtgactctgagatgctctcctatctctgggcacaccagtgtgtcctcgtaccaacaggccctgggtcaggggccccagtttatctttcagtattatgagaaagaagagagaggaagaggaaacttccctgatcaattctcaggtcaccagttccctaactatagctctgagctgaatgtgaacgccttgttgctaggggactcggccctctatctctgtgccagcagcttggcacagcccagcagagtcactgacattctgtatataaacttccgccttagctttgacttgagaactgcaggccccacccaggtttcactccttcaagggaagcttttagttgtttggaaggcatgtcttgtgtcctactgagggcagacctttcccaaccaatagagcccaggtttcctgtgccctgagtgtgcctgcttctgtgctgcaacttcttgtagtttgtcacttcctggataacttcagtagaagagtgactgttgagccccagatacgtgctagattcttcgtatttgttacatagcttaagggctttccacactcttgcacatcaaacatttctattcttcctttatagatagaaggctcagggacattgagtcattttccccagtgtctcttggcttgtaaggatcagaagtaggaaacaaactagtccatccattttccacctacccccctgctccatcatcaccttctgcatcctggtcagtaagtcagagccctcgcactgccctctagtgaccagcagggctgcagtagacgctcagatgccttcaggggtcattactatggcctcttcattagcaactttgaggaatgttaaatttaacactttttaaaaatcatttatatgcattccctttgtctttccccagtctgcagcttatgttttcacttttatggtgtttttttgatgcacaagagtttaatttaatgcaacaaaaactaaaatcaattttgtttgtgtgtagacaaaaaccgctttcttatataaatgtctaagcgtagttttatcaatttattctagtaaaatttaagcttggattttcaccactaagaataaatgtacctgaagtatatcttatgtaagaaataagatagagacctaggaatgggagggaaggacatatgttcagtgaagaagtaatagcctgtcaaagagagccctaaagtagacccccagagctgatggtggagaggtaagtggagggcaaatgatcatgaaccttgtccgtttgttaccttgtagaagaaaggcagccaggagtggagaccacatgggtgaaggtttatgacttgactgtaggttgaaggtggcagcaggtagagggaggactagcaggcagagggcagagtcactggctggcaggggcagtggcatcatcagttgactctactgacatccaggaattatgttcccaatgcgcaagttgaaaaactccccacaatttgcctattattccttgaccctgccatgaccaccagactcctcaatggtttggccgtctgccccctgagggcaggtgagtcccctaaagccttttccttggctcaccacatcccagcctaagcctttacctcaagtctacattattggggtccctctttgggcactcaacttccttctatcatagacttcacagaagctgggacaaccagatcccaagataccagagaacaaaggcaggacgtgaagtgacatggagatgcctgagactgccatccatgactacatgtgtaggtgttaataggagccaaggctggtgcacagctgatccgtcccagcacacactatacagaatccctgagggtctgtgactttttctcaaagccaaatatgtggccttggtgtcagacagcctctcccagacctctgtgcccccttgcaccagctttcaccccacagccaccttcctctgcacacaaagctcagtggtagatatagttggccttgtcttcatgagattttgatccaggcagtggaagacattgtcccataggagtttccccaacactgcccaggctgggactctcagatttctgagcagccctgtgcaagggaaactctgccctgtgctgagcttctctcccagggcagtctcagctggacaagggaatgcacatcacggtgatgtgagcagatgcagcctctcttccaggctcctcctccagctctggcctcagaagtcctcttcctcagttgctctcagaaaggaaagttgatttcaaaattgtatatttgcagacagcactgacaacacaggtctatgttcttttccctgtcagccttcacaactctatcttccccacaccatgctcatgtcagtcctcagcctcctccaagtgatgtctgctcctagctatcctctcatcactctgcaccctcacctccatgtcaaccacagacgcctgagttcaggccattcctcatgcatcatgctcctcccaccaaaggcctttgcactccacactgtattctctgtatcaacacgagtctcttctttttgttctttctccaaatctcagtttaactaccaccatctctagggagacactccttcaacagttttcctaggctgcacctccctattgtaaatgctcacagcttataatatgcattaatattcatagttttagcaccatagtcatttccctgactttgtgtggctatttcacacttctcttgcattctagactgtaaaatgcatcattgtagaaattgtggatgttttgttccccattttattgtcagtaccaacagcggttccaggtgccagtgaccagtcttgaaagaataaagaagagatattgaaaggccctctgagttcccacagactattccagaagtctggatgcattaaatgggaacctctatcccttcatctcctaggattaaatgagtcctggaaacagatgagaaatccctgtcatgcatgagtaactggatcccaagcctttctgcacgactgaacttcctcactgcccatcgccctcctggcttgtctcctccttcaatctccttccctcacaggtgtcctggatttgggagtctcacagacacagggcacctaatcactctgagagagtgatcagaaacataatgtcaaacactggcattaaaaggtgatggagaagaaaacaaatgccttccccattctcttaggcaaagttttcccaaggcacaaatatctttttgggtggctttgaggccatggtgcctgacacactgagctatattatgggtgttcatttccatgaattggtgggcaatgccagagacacagacctcatggtcaccagcttcctccagcccacacctgattttggtgcagggcgctgaacagagacctttgcttgttaccctcctttgccagttaggaaaggctgattgtgaggcagaggctccatttacagagcagggctatgtgttagtccctgaagaattgtgagagccattctgggtggaaataatcaaatatataatcaccaaggatggcccacggatagacagaagccccaattttgccagaatgatttgcatctatgctttaaagacaaatgcagttttatctctttaggcaataaagaccaaaaatagactagctattttaaataattgaaccttaaacagaccaaagtcagaacatcttccctagggacagcattttcttccacccactcactaaagctgtatttgagaaagctgtgtgctgttgataaacactgcaatatcgttacaatcgacatcataataatactgctacttggatcagaaacaaagagcatttctaaagcttgaacaatgtataactggaaacgagctctcactgagtttggaaatgcaggcactagagggtgctcatttctcttccttttccaatcagggggctattcaaaggctgttctagaacaaggggtgagatcctccacttccccgtggtgatcaggctttcagaggtagaagccttattagttcataatcagccgaactgacctcaccatcaaatgtatcgacctggatgctcaccctcctcagcagtcagagactgtgttcaccaggagcttgtgcgcttttacggagcacattttatcctcggtttattcggaaacatgggcctttatagggggttccataaacagaagctttctatattttgtccatttagacactacaaagtctgacaccagatgagaggtgttgcttaaagcttgtatgtggtgaagattttttaacaaataatatataaagaaaatgtcaataatgctctcaaatccaatcccaacttccatcggtaaccaatactaaagctctggtgtgctttgcacctctcttttctgtgttcatgcacacctttctacccaagtacatctacagaaaatgggttcacctgtacactttaccggccacatgcatactcttttctgttaatataccctggtctttattgttccagattgatcgatacacatctaacttgctctatttgctgcttcatattgcataatgagggtagacaggtacattcgtgctgtcatctgattcccaaattctgccagatcttttctaaagtgactgagtggtctatttatgcttccaagttctcctcaccccagcacccagttgatgattccagcttttccatcactcatggtcctagcaggtctgagagctctatcagttctcctgcatgaggaggcagggaaggataaaaggacagacctttatcaaacctaccagaaactacacagtatctcagttcatcctcataaagcattaaggggaatgtttgtcttgttttatagatgagtctagatgaggttagagtctaggaaagttaatgaatggccttgcccatggtctcagagctaataaatgttggaggcagatgaaggacagttttcttgcttctgtgtggagttgatagaggggtcactggattttgagggaggtgaagtccagaaccatctggggttgtcttcagatcagatgccagggtgcaggagagtctgtgtaccctacagcactgtaggtacaagcatcatggtgttggcagtggggaggtacagggggtaagtgtttagaggcctggaaccagaagatctgagctttgagaaaataatccccatcacaagatgtagcagagatactgatgtggatacactaggccagggagctctgtgaggagctgttgttaaaatgagggagggaggagaaccaactaattggtcacttcctatatgtgaaatgtagaggaaaacaatattaactagaatcctatctcattttagtcagttctcctttgtaagtagttggaaggtgggataatttattttcaaggttaagtaagcatctatacatctcctttaccttgtgaagtctggtggcgaagcgaaaaatggtacagccaatggagtcacagtttaataaataactcagagttcaaagggagactcttatgggccagaaattggtaaatgttcctgcattctaaaattaggaggatcttattttctttgaatcggcagagaaggaagcacaggcaatggggagggacagttgggaacacggcagagtggccacaggatgtcgaagacaaaggacatgtaatatcaaattctaagctgtgaagctgtgatgcaaccctccaccttctcctaatggattttttaggtctcagcacagatgcccacctgagggagtaatttctttggaaataaaggacaaatagctcggttaataacaagtccaccttacaaagcacacctggaaatggaaacaagattattcctaaggccttttctactctaagagtctctaacttggtggcaaggtgagaggtgaggatgggggtgttttgatccacacgtgatgagtaccatgaagctctaccatgaagcatatagtgttgagtgtgaatcagagccctaagaataactccctttacgttgttgtgccctctgccatcccaaacccaccccacccataattaagcagccacgaaaatgaggggagccagaaggaatcaaaccctgctgcttggttcagtagacagaaggacctggaggaagggtgttggctgggtctaggagaagatgatgagctcagaaaatagacaaggagaaaccccaggggaaaacttgtgaaaccccggaggaatcacaagatatgttatttgagctccttttaaattttatttaatactaaattaatggcaggaatcctgcacaaagggatattccctatgaaacatgacatctcagataaaaacagagcattcttccttaccctaaagtctgccctctctccccaagtccctcatgcatcaggtcacctttgtgcccataagtcatgggcagcgctgtgtggtcaacatcatccacacctagaggacagtcagcaaagtgaggtggttctgcctgctgtggtctcaccccaggcatggaaagcaagagccctgggagcagcggaaggtacacagctgggtttctcaggagtctcatctgtcagtgaattgacaagaaacagagcaaaacgactcctccaatgttgatgagcctgcccctgggatttggaaacttgataacagagaaaaccaatatagacaaaggattttaaacaggattatggtcaattaagcaaattagaaaaggatacttgaaggagtatttgggacacagaagtcaaaaacactaggaagacatgaggtgtgtccctaagactctagactacagcactgtgtagataactaacacttaactattaattatatcattgaagaaataaaatttacattgaattacaaactgtttccaaaaggtcatgaaaatcttgtagacttgtttcaaatcacacaaatgtgttcttctcattctcagctcttcactggtgcatttattttggatttgatcatctggggaagaggtgtggcctctcctgaaaggaggctctgggcccaggcagggagactgaggtctcagaatgactcccttgagagtcctgttcccctttcatcaatgcacagacccagaagacccctacgtcctgcagcccctgccatgagcatcgggctcctgtgctgtgtggccttttctctcctgtgggcaggtgggtcctggcagagccccttgcgtggatgtcaaggcccatcccctttccactggggctgcagcatcagctttgttcttctctgcaggtccagtgaatgctggtgtcactcagaccccaaaattccacatcctgaagacaggacagagcatgacactgcagtgtgcccaggatatgaaccatggatacttgtcctggtatcgacaagacccaggcatggggctgaggcgcattcattactcagttgctgctggtatcactgacaaaggagaagtccccgatggctacaatgtatccagatcaaacacagaggatttcccgctcaggctggagtcagctgctccctcccagacatctgtatacttctgtgccagcagttattccacagcgctgcaagcctgtctcctctctgcacataaaggcacagaggctctgccctcctcccacccaagactcaaggatgccctgggcagagttctctgcaccaggaaccttggaacccagagtggccccaagtggccaggacagtatgagtctcactctatgccaggtgccacttcaggcagtctcagccaggcctggaagtggtcctaggttctcagatgtctcctttgttgctctctctggtatatcctccaagctgtcctttttgtgtagggccagggcttccccagctcctactttcctactcattatcctgaatccaaggtgcccaggatgaaactggatttgtatgtcagattcatctatactcccatctctccctggtgaccctgttgcttcctctctctatggtttcccccagcccccatcctcacgtgatctctcctgtggcccacctttcccatctgggtagtcaccctccaagtccttgctgggtctctcctcccctcacctccccgcccctttctactgcagccattaggggagcccctgttctgtgcctccttacttcccatcacagagacttcaaagtccatttcctctgccctgggctggagccttccttcctctaatggccagctcctacctgtgcttcagatctcagcatgatccgcccctcctgcgggaagcacaccctcacctccctgctgagatcaactttcctctcataagctctcacagaatcatatgtctgttggtaacctttagcacagttggactttctcaggtacttatctgattatttttgtgctccacccaatttttttttttttttttagacagagtcttgctctgtcaccaagctggaatgcagtggcaccatctcggttcactgcaacctctgactctttggttcaagcaattctcctacctcagactcccgagcagctgggattacaggcacacaccaccacacccagctaattcttgtttgtatttttagtagagatggggtttcaccacgttggccaggctggtctcgatctcctgacctcatgatctgcctgcctcgggctcccaaagtgctgggattacaggcttgacccaccgcgcccggcctctccacccaatttttaagcccatgggagctaagagtgtgccggctgcatttaccaatattggtgcctggcatgtggggagacccatttcacagagaatggatgagtgaatgagaggctgagtgagtgatgagtgggtggacgaacaaatagtaggaacaagctacatctactgtaaactggcagagatctagcattaagtacaagaaagcccacccctttgactgctgggctcaggtcggtcttggaaattgatggggaatcactatcatggcatccacacctgtgtcaaggcttcctcttgtggctgcagcacctgacctcctccaggtctctgtgctctccttcaggatctttccccacaacaaatctagacagatcagagatccgcttcaagaattccatccttaaaggttgttccttgaaaccacttctggtaagaaaatctccattaggtttgcatcaataaaacagggccactacaagtttgagagtgtaacagatttatgatcagaattagactttatgcatatgtgggaggagctgaggaagacaaggtcttgaggagagaagtcagaaggtgagggagccagtcagtagtcagggctcctgaagctctgggcaggacgtgctggagtggcaggaacatgagaggatcagagcatatcaggccatgcagtgggatcttgagctgggagcacaggaaaatgccaaggaaatctgtttctgggaaagctgttccctctctatgggggccacccctgcagatgcactaccaaacactgtgggcagcctggctgctgttggccagcatttgggaagatgaactggacacagggtgcagaaggaacaggacttcctaggtctgttggatgcctctatatctgctggtcactgactctcactgtccaaccacgataacctgccaattgtcatagtgactgttttatatctgtcttctaaatgttacaaaatgtatccttgaccatctgtaacccagaatgataaaagaaatggcattctggtaaatacaggctcttgccattgtagagttgacctaacacaatccagcacaggatggattctcccagattaaggcattggacctaacacaatccagcacaggatggattctcccagattaaggcattggatcacacaactgccccaacccgccacaatccctggtcttctatccgggggacacctgtgctgcccaggtgaatgtggacacaatttgtgtgtagatgttccagacgctggtgactaacttttcttttaatcctgtgcctgaagtctccctccacccagagagtctatatgtgtatatctgtctgtctatctatctctatctctatctctctctctctgtaatttccacttggaagaaaatgtcatgatgactacatgttactgggatttatttatgaaaaggattttattaaaaagaattagaaaatttgaatccttttctgaatttttccttgggactgtcctgagagcatttttgacatgaccaacctttgtcgtgtgtgtatttggcagcctagagtgcagcagagagttattggccccacatatttgcgagttagactggagatggctgtaaaaatgactgactcttagtgttattcactctcagtctgggcctcactagaatgtcacagactaccatcgaacaaatagattcccagtatgaagaatattaggacatagcaacgaggaaacatgagcacaagcaacaaacgtttgaagtgcaaacctgaagactcgaaattttggcattataagatatgaaagtttggagagctacatttaaatgaacatgagggggaactgaaacaaggaaaaagagaatgtctgaaaccaacaacttgcataaaaattgtcaaatagtatatctaggaatgcctcatacaatcactgaaaacaaaatggaaaggcaagcagttgataagctcctcctatagagatttttagtgatgtcaaagatggatctgcaggagtgatctagaatgcagcacagaaaataaaaagtgaaatatgaaagaagttaaagaacaaggaagaaaaaaatggatgtttcctatgtattagaatatgcatatttttcataatttctcattcttttcttgcatatgatttatgtttcaaaaagataaataggaagaatgttatgaggtgatatttatgagatgttagctgagaatttttagacgtgtttcaggacctaagttcagagtttccagaatcaaaatgaatctcaaataagacagtcaagtcatagggaaattgtagaacatgagggaaaaagagaagattttgaaagcagtcagaaaggaaagagaaatacgtcccatagaatagatggagaacaacagtaagtcaagatagtagttaaaaataaccattagctcaattatcattctccttcatttaaggtgagattgattaaaaaaacttttagaagtggaatatgaaaaatgactgctgtgagtttgctaccaaggtctctttactgaattacagttaagaaaggtgggaaatgatcccagaagaaaggcatgagggcagttcgtgagggaacccatgtgatgggacagtcccattggacacgtgtgactgtgggaatggaggaggctggggcatcagtgaggatggcagaggggaccctgaattgcaggatagacaatgagctcatgccttggtgccttgtgttgggggtgctgttagtgcatcgacaggacatgcccagcagacagaggagtggctgtaggatgagaaggtgaactcagagatgtagtgtgaggcccacgggtccagacagcatgggagcccaaaaaatgaaccatgcattgatagtggtaaaaagctgatacatatttaaagcagcacccaagtgtgttctaatagaaatgctgtgaccctgaggtcctggggattgagagaggaagtgatgtcactgtgggaactgccctgtggagacaaggacggcccttatcctctgcttctgttcacagtgacactgatctggtaaagcccccatcctggcctgaccctgccatgggcaccaggctcctctgctgggtggtcctgggtttcctagggacaggtgagtcctcagaacaccaagtagtttcattttttctgtttgtaggtgtgtgtgtgtgagagagtggttgtgtgtgtgtgtgtgtatgatgactacaaatattttccttattctgttgccaaattctatttccacagatcacacaggtgctggagtctcccagtcccctaggtacaaagtcgcaaagagaggacaggatgtagctctcaggtgtgatccaatttcgggtcatgtatcccttttttggtaccaacaggccctggggcaggggccagagtttctgacttatttccagaatgaagctcaactagacaaatcggggctgcccagtgatcgcttctttgcagaaaggcctgagggatccgtctccactctgaagatccagcgcacacagcaggaggactccgccgtgtatctctgtgccagcagcttagccacagcatggcacagttgcctccttcctgttcacaaacctcatccttctctctccttgcagctcctagagaccctaaacagaggcctctctttgctcctcacttttcatgggaaagaattacatctggacttcagctgttctttgggtagaaagagaccacagattcattcctgaaacacagtgactgaaaatgtaggtggtgaaaacaatcatgggagtccttggagccagctcactgctccaagcaaggagtgggtgtcttagtcttggccttcagggcagacatgcatcttctataggtcttggaggctgctgtgctgcccacatccatgaggttgtcatgggcaggaaacacgctcttctcctgcatatgttggggcatctggaaggtctgaggttacatcccaaggaacatctttcttctgaagcctcttctatccgtgtcacattagaggttttctgcaacaaaatatcgaacctctcttcctgtttgaagtaaaggtctttgcaacttttgaaatccttacttgataaatacagtcaggataacaataagacttcatttcttctgcctactttaagccaggtgtatccttcattttatttccatttgctattgctgctgtcctgatagacagaagtatgcattcaccaccactgccagttcaccttgattctctcaggaaatctgatttctagactctgagggttttcattgctgtccaactcatttgatttgaaataatttttctgaggccgttaagaagtgttatatttataatattgattctattgctgtttatttttcatattatatattgttatatagtacttgttatagatagaagtacaatgattatattgcaatagaatcttccacctgtctgtgggtgccgctgcagtttgtatctatgaaagcgaatgcactggtcagagctgatgtgattatgaatcatgggtttctgagagtcctcggcgacagaccacttctcccagtctgggactcagtgtcccagacacagccatgatagaggtgccctgagtctttcctaggtaggaggggcatcatagcccttcccaattcactgatcagaaattgtggttgtacagataccaagtttctttcctcagagaatgacggtctctggcaggcagttgctctggacccattttttattgtgccatcatgaaatccctccttgctcaggtgccctgtgtctcctgggactgagtaaggccagggcacagatgggaattccctgtcttcctagaccttctctctaatggctgccaccttcctccacttgactcctgagacatctggttctaacagtggataagctctgacactgaggctgaacagaacacagtccacaggtgtaaatggtgctgcaaggacatgtaataaagtgagcagggcttccaatttatactgagaatgaacatgcaacaggagcaaagggcagacattactaatgaacaaatagggtttctgctctaatgaaatcattctgttgtcttaagttaagcaggagaaacttttcattgcaattacttcaagtcaaaggctagcagctcccaaccaaccaggataactctttgctctgtgatctcagcagcttcagaggactcagaaatcctttctctgcacaaacttccctttgtccattccaaaacccaggatcacacactgatcctatcatgaaaacaatgaggtgtgctatagttgctgtggcctcatttttagggtgttcagtaggaagcattgaagaactttgaaagctttgctcttgagtctagggatgtgctggagccagcttgtatcattcagaagagccaaataggcatactcttcccagctccctatttagtgaagccatgttggcggcatgaaatctaccatggtgggtatgctggtacaaccgaaattagcaaatgctaccagccatgcccccaccttcacagacacccagtttatcagcacatccctggagtattttctgatgtccgttatgccatgtcttgtgggcccaaaagggctcagaattcacctcccctctagtcttgctcctagaagccatcatctaagggggcctccattgttcctatttctgttctacctccaaattctcttgccttgtggttgtctcctacaagcatgccactttggaacatgacaattattttgattgtgactaaaggtatcactgaaccagttaattttttatgaattatctttcctagcatggaatattcagatgctggagtcattgggaacagagatgagcatgcagcaacatgcaagttgtgaaacacttacagccccgctattcttctgtggcactgacagaccctgaaacaaggactattttgctttggagactaagcagctccgcaccagtcaggaatgactctgcttttactttaggctgagaggtcagaaggatcacaccctcagtattctcctctccaaggcggagtgtggccactctccatctcagtccctggaagttgcccagggctccctgagaatccctgctctggggcagaatcaccaaggctcatcctcgccagctccccacaggctccagcagggctttcctgccaggtgcagggcacaggaatggctctgcctgtctcttaggtagagggaggccatacaatgatgtttgtataagagggactgggattctgggtctcctttaaagtatttgacaggccaggcagggtggctcacgcctgtaatctcagcactttgggaggccgaggtgggtggatcatgaggtcaggagatcgagaccatcctggctaacatggtgaaaccccgtctctactaaaaatacaaaaaattagccgggcgaggtggtgggcgcctgtagtcccagctactcgagaggctgaggcagcagaatggcatgaaccccagggggcagagcctgcagtgagctgagatcgcgccactgcactccagcctgggcaacggcgagactccatcttaaaaaaaaaaaatttgacaaaattttctttgatttttgttctattttgccatctcaccaatgaggagagcaatctcttggtagttatattgtttttggctcttgggaaagtttttgtggttaagtcacattaagaaattgtgccttttttccctgttcagatataacccaaggcagtgaaagaaacagcaataattttgaaaacagttagttatgcatcctatgataaaggtgttaagtttcattgcccacatctaactttcagtctagtggaaatgaaaaggcacagttagggggcatgtgagcatgccatgagagaggtcaatgccaattgagaagtctgtgccaatccccagtactgtgggattgaatgggagggagagatgacctctccttcagactgttctgaacaaggagggagtgagagttcatccatgggaacctgaggaggagcaaatcccaggggcatctaactcagggtgcaggagcaaatccttggagaggaaaatggtccagttcagctgtcacaggagataggagaacgcaaagtcatgtaatccacagtcccctggctgatttgcttccttatgatcctattttgcatccgtgtttcctcaactcccgctgccccctgcctcttccagaatcatgttttggctctttggtgctcagatcagtggatgtgcattgtacaagttgatcatttcctgtacaagcccattgctgctcttaattatatccatccttattttgtgcattaggtactgctccctacaccactgcttattgccgtgtaataagtctcattttgtgtatttcagttttactttttattattacacatttgacttcatcttctgcttatctatacttttggggtaacattgttatttttggaggacatttttgtttatctttagtgattcagattaaataatctctttatacttcaacgtctgtcttttatttctatttaaaaccaaatattattttcttttattcctctcattctgttcctctttctttagttgatagttttaagggagaaaaatttagactataactggagctacgtgataagagttattcagaatgaggctgggatattaacattgttaactcaaagcaacagtcagcattagaactagtgttgggatgagggtttagggaagctgctcataaaacctgcagaatggtacttctggaatattctctcagctcactctgcagacacttcccagcattccttgggccattgcagaagcaacaatgatgaaacatcacttactggccataagatggcactgtggtccactgggatctaaagggctctggggagtctgggagagcagcctaggagggaaagggttaagaaaaattagggcttagatccagtattatgcagatgttgcagcagttttcagttttgccagactacctacagctatgcgagaggtgggaagtccctctaaactttaatgagatctacagttgaataattttggctggacagctttggtgtcagggacaggtgcagaggagcaactgcctcagagaaagctaggggcaggatgtgccctgagcccagtgcatctgcgctgcacctcatcttccctgcaggtcttgccaggcaacagctttaacctgctcaagtgatctgggattctataagtttgtaagtcgtactgataacatcatcttggctgagattccattgggcaccaagcacgtgtactctggaggacaaaaaatattgataacagttctaaaacactcaagtaaacaaactactgaaggaaaatgttaatagatgcaccaaactgtactgttagacttgaaaataatcaactaatagaattatcaaaaagagactacaaataaatctttactaagtatttgtgggcatcgagcagtgtctgagtcctctcagggtagattaaggaaggagttcagctattatcatgactttggcttggatgaaaatccatgacctcctcaactgattttcttgtaaaatgttacagaataatattgagcaaacattttatttttctccagcctgtatccctccttagcactaacaggtaaagcggacacctagaggcacggtttctttagttgggatccattaactgcaggactcggaggtccatagctgggcttcacagggagtgcaaaccccacgtgcaaggaaccccgtgtgtctgtgctgtgcccaactcccttctgtgaggctgccaaaggcggaggtccgggtgtcccaggaccccactcacaaagaggggagcaggctgcttgctgggcaaaaaaatcagttcaccaattggccaatatgttgaaaaccaaaaagaaaggaaaggctcaattgtgagactgacgaacacccaatttcccaagttatgaaatttgtagcagctcatggttctcagaatggtttcaacagcctatgaagatatttttagaaagtttttgtttgtctacagctttccttgatattgatcctcaggtttttttcagcccactcatcacttgaccttattttgtggccaaatttcagtgttgcctatttcagtcactgagcacttctcattctccaaatcttacacagatatgtgtgttcctgtcttttcttctttttgtgtgattcatttttaaattgggctgtgcagaatacaagcatacatttgtaaatgactcccatcttttatgcaatttagctgtttaatttttagtaatactttttatttaaggtgtaattaatacacagtaaaacacaaatattaatacaaggacatcctggtacattttgacaattgcatgcgccagtgcaatagtaactaaatgattattaaaaaactttccatcactcaagaaagtgtccttatgctcctttccaatcaatttctatcccagagataaaaacttttctatttttatcaccactgactagctttgtctattcttcagtttcatataaatggaaacatatttttattatttttcttcaaaattagtagttttgaagtgtattcatattgttgtatcagtaggtcattctttcttatgactaatattccattgcataaatataccacaacttgtttatccaagctcctgttgatggatatccacgttatgtctgtcttcaactattatgaataaagttgttgtgaacattcttgtggaattctttcttgcgaacatatgcattcttctttttttttttgatatagatttaagagtggaaatactcatagtgtagacacgtgtgctatgcttgcgtgtccccacaaaagctcatgttgaaatttgtcagtgtaatggtattgggaggtgggacagttatgactaggtcatgagggatctgccctcagaaagagatcaatgcccttattggaggggtgaattatgtcttgggaacggtcttctgataaaaaggatgaaatcagctgttttctctgtcttgggtgcttgcttccccttccttctgccttggataacagcaggaggccctcatcagttatggacccttgatcttggacttcccagtctccagatctgtaagccaaataaacctcttgtctttataaattgcccagtctgtgatatttctctatgtcagcaggaaagacattgaaagaaaaaatggtaccaagagtgaggctgttgctataatacctgcaaatgtagaagcagctttggttaatgggaagcggctaatggatagaggttgaaagaactgggaggagcagactagcaaaagcctagactcctgaaaacagagcattaagggcaattctggtgaaggctcagggggaaatgaggaacaaggtatcggaaattgaagtaaatgccatccttgtggtaagtagcaaaatccttggcaaaactgtgttctgttctaggaatttattgaatataaaaattatgagtcattcgctaggatatctgctgaaagaaatatctaagtggctaagcattcaggctaacgtgtgactactttcaggcaccaggaaatttaaccaagcaagaagggagccaagggaatagattttgcaaaccagcacagatggtgaccctacctccctctgctgtcccatctccaataagacaaattctgtgctgttagctgttaaagccctagaattatttctgaggaatctgtactcttcataatttacagacaacccagctctgctttggatctgatcagatggactaaatcttggggactctgcaccactggccactgaggaaagggaagagaatgttgcctgggacagaaaatatagtaagaaacattggtgtgaatctagcatcagaaagatgatgtgaggacagcaaggaagagcaggaacctgaagtttaatcaggctcctcgccctctgctgatgggcatgtgtgtgagctccagcatggagcaccgcagcactaggtcagaggagagtaagagggcgatggggcagcctgtgagctggggcagtgtaggcagaggagtaactgtatcatcacagaagcttctgccttcaaccatccctccagctctgcaggacaggtagagagtccagggtctgtggggcactagacctaaggaaggcttcctggggaggacacaggacagcgacatcacaggatacccctcccatcaggaaaatgaaggcccagaactcactcggctcttccccaggaagaccaagccctgaatcaggtgcagtgccgcctggcccactgtgccatgggacccaggctcctcttctgggcactgctttgtctcctcggaacaggtgagtcctgggcacaggacagcagccccattctcagctttcccaccccagtgtcctccactttaccttggggaggacctctgggctgtctcctgagctcatcctccatctgcttttcctgcaggcccagtggaggctggagtcacacaaagtcccacacacctgatcaaaacgagaggacagcaagcgactctgagatgctctcctatctctgggcacaccagtgtgtactggtaccaacaggccctgggtctgggcctccagttcctcctttggtatgacgagggtgaagagagaaacagaggaaacttccctcctagattttcaggtcgccagttccctaattatagctctgagctgaatgtgaacgccttggagctggaggactcggccctgtatctctgtgccagcagcttggcacagcccagcagaatcactgacattctgtatataaacttcctgccttagctttgacttgagagctgcaggccccactcagtcttcactccttcaagggaagcttttagttgtttggaaggcatgtcttgtgtcctactgagggcacagctctcccaaccaacagagcccaggtttcctgtgccctgagtgtgcccacttctccgctgcatcttcttgcagcttgtcacttcctgggtaacttcagtagaagagtgactgctgagccccagatgtgtgctagattctttgtatttgttatgggcttaaagccttgcaacaatcttgtacatcaagcattcttattcttccttgacagatgggatgctcagggacattgagtcattttccccgttgtctcctggcttgtaaggatcagaagtaggaaacaaagtagtccatccattttccacctacccccctgctccatcatcaccttctgcatcctggtcagagtaagtcagaaccctcacactgccctctagtgaccagcagggccgcagcagaggctcagatgccttcaggggtcattactatggcctcctcattagcaactttgaggaatgttaaatttcacactttctaaaaatcatttatatgcattccctgtgtctttccccagtctgcagcttatattttcatttaatggtgttttttgatgcacaagagtttaatttaatgcaacaaaaactaaaaacaattttgtttgtgtgtagacaaaaaccgctttcccatataagtgtctaaatatatttttctcaatttattctaggaaaatttaagtttggattttcatcactaagaataaatgtatctgaaatatatctcatgtaaaaaataaggtggaaacctaggaatgggagcgaaggacatatgttcagtgaagatgaaatagtgtgtcaaaaagagctggaaagtagacacccggagctgatggtggagaggtaggtggagggcaaataatcatgaaccttgtcagtttgttatcttgtataagaaagacagccaggagtagagaccacatgggcaaaggtttatggctggtctgtaggttgaaggttgcagcaggtagagggaggaatagcaggcagagggcagagtcactgtagggcaggggcagtggcatcatcagttgactttactgacatccaggaattatgtccctaacacacaagctgaaaaacctcccacaatttgcctatttttccctgaccctgccatggccaccagactcctcagtggtgtggccttttgcctcctgggggcaggtgagtgccttaaagccttttccttggctcaccacatcccagcctaagcctttacctcaggtctacattattggggtccctccttgggcactcaacttccttctatcatagatttcacagaagctgggacaaccagatcccaagataccagagaacaaaggcaggacgtgaagtgacatggagatgcctgagactgccatccatgactacatgtgtaggtgttaataggagccaaggctggtgcacagctgatccgtcccagcacacactatacagaatccctgagggtctgtgactttttctcaaagccaaatatgtggccttggtgtcagacagcctctcccagacctctgtgcccccttgcaccagctttcaccccacagccaccttcctctgcacacaaagctcagtggaaaatatagatggccttgtcttcacgagaccgtgatccaggcagtggaaaacattgtcccataggagtctcccaacactgcccaggctggggccctcagatttctgagcagccctgtgcatgggaaactctgccctgtgctgagcttctcttccaggccagtctcagctggacgatggaacgcacataaccatgctttgcgtggatgcagcctctcttccaggcccctcctgcagctctgacctcagaagtcctcttcctcagctgctctcagaaaggaaagttcatttgaaattgtatatttgcagacagcattgacaatacaggtctatgttcttttccctgtcagccttcacaagtccatcttccccacaccacactcacgtcagtcctcagcctcttccacgtgatgtctgctcccagctgtcttctcccttcctctgcaccctcaccttcatgtcaatcacagatgcctcaattcaggcccttcctcatgggtcatgctcctcccaccaaagccctttccactccatgctgtatcctctggctcatcagaagtctcttctcttttgttctttctccaaatctcagtttaactaccaccatctctagggagacactccttcaacagttttcctaggctgctcctccctattgtaaatgctcacagtttataatatgcattaatattcatagacttagcaccatagtcatttccctgactttgtgtgactgtttgacacttctcttgcattctccactgtaaaaggcatcattctagaagttgtggatgttttgttccccattttattgtcagtaccaacagcggttccaggtgccactgaccaatcttgaaagaataaagaacagatattgaaaggccctctgagttcccacatagactgttccagaagtctggacacattaaatgggaacttctatcccttcatatcctaggatcaaatgagtcctggaaacagaggagaaatccctgtcatggatgagtaactggatccaagcctttctgcactactgaacttcctatctgcccatcgccttcctgcctagtctcctccttcaatctccttccctcacaggtgtcctggatttgggagtctcacagacacagcgcacctaatcactctgagagagtgatcagaaacataatgtcaaacactggcattaaaaggtcatggagaagaaaacaaatgccttccccattctcttaggcagagtgttcccaaggcacaaatatctctttgggtggctttgaggccatgctacctgacacactgagctatattatgggtgttcatttccatgaattggtgggcaatgctagagacacagacctgatggtcaccagcttcctccagcccacacctgattttggtgcagggcactgaacagagacctttgcttattcccctcctttgccagttaggaaaggctgattgtgaggcagaggctccacttacagagcagggctatgtgttagtccctgaagaattgtgagagccattctgggtggaaataatcaaatatacaatcaccaaggatggcccacggacagactgaagccccaattttgctggaatgatttgcatctatgctttaaatacgaatgaagttttatctctttaggcaataaagaccaaaaatagactagctattttaaataactgaaccttaaacaaaccaaagtcagaacatcttccctagggacagcattttcttctacccactcactaaagctgtatttgagaaagctgtgtgctgttgataaacactggaatatcattacaattgacatcgtaataatactgctacttggatcagaaacaaagagcatttctaaagcttgaacaatgtaaaactggaaacgagctctcactgagtttggaaatgcaggcactagagggtgctcatttctcttccttttccaatcggaggctattcaaaggctgttctagaacaaggggtgagatcctccacttctccgtggtgatcaggctttcagaggtagaagccttattggttcataatcagctgaactgacctcaccatcaaatgtatcgaccttgatgctcaccctcctcagcagtcagagactgtgttcaccaggagcttatacgcttttacatagtacactttatcctcggtttattccaaaaaatgggcatctataaggggttccataaacagaagctttctgtactttgcccatttagacactataaagtcagacaccagctgaaaggtgtaacttaaaagcttgtatgtggtgaagattttttaacaaataatatataatgaaaatgtcaataacgctctcaaatccaatcccaccttccactggtcaccaatattaacactctggtgtgcttcttttcacctctcttttctgtgttcatgcacacctttctacccaagtacacctacagaaaatgggttcacctgtacactttacctgtcacatgcatactcttttctgttaatataccctggtcttattgttccagattggtcaatatagatctaacttgctcctattagctgcttcatattgcataatgagggtagacaggtacaattgtgctctattgtctaattcctgaattctgccagatcttttctaaagagactgaatggcctctttaggcttccaggttgtcctcaccccagcccccagttgatgattccagcatttccatcactcatagtcctggcaggtttgagagctccattggtttctcctgcatgaggagacagggagggataaaaggatagacctttatcaatcctaccagacactacacagtatctcagttcgtcctcctaaagcattgaggggaatgttagtcttgttttatagatgagtctagatgcagctagagtccaggaaggttaatgaatggccttgcccatggtctcagagctaataaatgttggaggcagatgaagggcagtcagcttgcttccatgtggaattgatagaggggtcactggagtttgacagaggggaagtctagaaccatctggggttgttttcagatcagacaccacgggtagtatggtctgtgtaccctacagcactgtagatacaagcatcatggtgttggcaatggggaggtactagagaggtaagtggctactggcctggaaccagaagatcatagctttgaaaaaaattattcccagcacaagatgtagcagagacatcaatgtggataaactaggccagggagctctgtgaagagctgttgttaaaatgagggagggagaagcaactaagtggtcacttcctatacattaaatgtagaggaaaacaatgttaactagaatcccatctgattttagtcagtttttcgtttaagtagttggaaggtgggataatttattttcaagtttaagtaagcatctatacatctcctttaccttgtgaagactggtggcgaagggaagaatggcaaggccaatggagtcacagtttaataaataactcagagttcaaatggagactctcatgggccagaaattggtaaatgttcctgcattctaaaattaggggaatcttattttctttgaatcagcagagacggaagcacaggcagtggggagggacagttgggaatacagcagagtggccacagaatgtcgaagaaaaaggacatgtaatgccaaattctaagctgtgaagctgtgatgcaaccctcctccttctcctaatggtttttttaggtctcagatgcgcacctgagggagtaatttctttggaaatgaagaacaaatagctgtgttaaatcttaataacaagtccaccttacaaagcacaactggaaatggaaacaagattatttctaaggccttttctactctaagagtctttaacttggtggcaaggtgagaggtggggggtggggatggtgttgatccacatgcgatgagtaccgtgaggctctaccatgaagaatacatttctgagtgtgaatcagagccctaagaataatgccctttacgttgtttgggaccaaacccacctcacccataattaagcagccatggaaatgaggagagccagaaggaatcaaaccctgctgcttggttcagtcgacagaaggacctggtggaaggatgttggctgggtctaagagaagatgatgagctcagaaaacagacaaagagaaatcccaggcgaaagcttctgaaaccctggaggaatcacaagtcaaatttctcccagaagatggtggcagtgactcaccttcaggtacaactggctggtgctacagagctaagatggacttagtgtgttggcagtttgcaaaatctgggccatttggtcattttcttcagtgactttttaaagtgaagttttacttccaacattggcctgatgtgtgggtctgttcttatgggggttagggttagagttgctccattacttgagtacccatgaagtattattggtcatagaatgagcaggattatcaggagtagaaggggtagggagagggagaactgttaagtgaagcagtagggttgagtgaagagtattttagacatatgagtacatagagggatgaaagcccagctagcccccagcccccatagaaggaagatcaagatttgacaactaggagaggcatgattacaccatgcagcttgatcaaggactgagaaagctttctagacaaatgacaggtaatgacccacactgtgaatcggtattgaacgtgagatgtcaatatatattcatatatccacttatatatctaaaataagaagtccttacaaaccctgaaaacataaaccctcactattacaggatgtgcaggtgatttggatcctgtgaagaccctcaaacaggattaaaatccagtaggcagaggtctctgattctttgttagctacagaggaagatgtgctatgatggacacctagggggtctgggggtcttcccatccccttcccagatccacacctagaggaatgtcaggcagcacaattcagagaaccaccagaaaagctgtgagaataggactccaatctgaatccagcttctctcagctctgcaccccttgctgtgtaggagtcagtgcaggagaaagctgactgggtgagaagagaagggatcctgaaccatgccagaggagacctgtgaactgggaaatgagcagcaacagcaccaccacagacacacactcgccaggcacagggagaggacagatcctggcctcttgtagcaccagagctctgaacgccctctacctgctcagtctcccatgggatctaggctcttctcctgggcgctggacatgccttggtttctcaaaaccaggtgtgtcctggatgcacctgggggaatctcagctctgaatatgccaagccttgccagaggaaccatgtattttgaaaacccacggggtctgtgttaaaaacaacaatttccctctcagagcatgatgggattccatgttcctgcttagttgtgctttgtctcctgggagcagatggctctggaaacctctgagggaaatccctgtccctgcaactgctgtgcctcagttccaaacattccccatgcagtctcctacgtcctagctccaggttctatctccattcatgaaactgtgctcacacagacctcttgaaagcaggtaatgggtatggagcagcaataggtgtgaatacatcctactttatggcatcatctatgggaagcaatgtcagctggaaatgcaccagcatgaattttatactattgtgatgtagcacttctgagattgaaggtacaatggcatattccaagctggtcaaccaaacatctcactccatcagctggacacacatcccctagtggggtgggattctgtgggtctccttttgccagcagcaaagaccttgctgaaccatctcctctgctttgcttcaaacttttcctccactttgcaggatcttctcaaatctgggtctaacttgcctgcagtgagaggaattgtgactattgtccctcatatgaaagagggtgcccatgaagttttaagagttaagttaggaatgaaaatgagaaattaattgctcataatgcagactgttaggaaccccaaggattaattcaactccctattttttaattgtactactcccatcacaatgtcaagggtaaaacagttctgactttttctaaaggctatggaacatttattgatttcagaggtgacttagaaacacaggaggtgtcgtgataagtagtagagacaaaaaagaaaaagtattgagattaatgaattcatatggggaattgtttaactgttctttttttaacctttagaatgagttgaagatcccaacttagcttggtgcctgctggaggcaacgtttcttcccttgcccctctgagctgtgaattgaaactctttcgggaaaaagacgcggcaattctctccacttcccaaacacctcccactcctacccagaccgtggatgggcaggaaatgcaggaacagagccagaaacaggagatctccaaggaaggttgacagtcagcactgggatcgtctgtgtaaagtgctgctgaagcagccaggtggcatgtccagccgacaatgcgaaaggaaaaagtgagaagacttcccgaaggcggagggtggaatgcgggcagcagccccctggagggctgagtggggaaaacaaaatggacctcacagaagctgtgtgtgtggaaacccacttctgacttatcacttgtcatgaattctatgcttcatggtgttacaccgtttattgtttctgatgagtgacagtaattattttctttcttgctggtacataataaagtggtgcacatcagagttgctgccatcttagacttaactcatcagtatcaggtgatcctgaggctcagtgatgtcactgtgggaactgctctgtggcgacaaggacgtccctcatcctctgctcctgctcacagtgaccctgatctggtaaagctcccatcctgccctgaccctgccatgggcaccagcctcctctgctggatggccctgtgtctcctgggggcaggtgagtcctcagaacaccaagcaatctcattgtgtctgtgtatgtctgtgtgtgtgtgcgtgtgtgtgtgtgtgtgtgtgatgactacaattgttttcctcctgttcccaacttgtatctccacagatcacgcagatactggagtctcccagaaccccagacacaagatcacaaagaggggacagaatgtaactttcaggtgtgatccaatttctgaacacaaccgcctttattggtaccgacagaccctggggcagggcccagagtttctgacttacttccagaatgaagctcaactagaaaaatcaaggctgctcagtgatcggttctctgcagagaggcctaagggatctttctccaccttggagatccagcgcacagagcagggggactcggccatgtatctctgtgccagcagcttagccacagcatggcacagtcgcctccttcctgctcacaaaccctcaggcacttacttctccttccagctctcagaagccctgaacaaaggagctgccctgctctttcctcagcaaggagaatgaatgcatttggaactgcaggtgttcttctgatactaggaggtcagaaaataacctctgaaatacaggaacagggaatactgggtagtaataattttgacttatggatttctgggattccttatatatagttcaaatttccataattaggatataacagagcttagtctcatggatagtgactaagtaaatattcttttatagaactatgaagtttcagcacatttatattaaactactgttaccacatgtcaccaactcagacctataatctaccaaggagtggggaagccaaacgcaaacactgctaaggccatttacagctaccacccttggaagaaaattggaatctttagtaagaatttccatcaaaatcaattttttagaaataactattacccacaataatgcacattaactcatgttcatacattgctttttttccttctgaaaatcttgtagtcattctatgtttaatttccttcttctccagtctaacttaaaaaaatagaaatacaaattgagattgtttcataagataaaccccacctgggaaggtgttaaaaggacacaattcaaagaaaacctgaataaaattatatcaaccacgtaggattctttgaggtttccaaagaagatgtaccagtttacattcccacgagaggtatatgagttttggatggaatttttttttttctctctctctctctgtagattagtttttccctctactaatagtttctcttgacaaacagaagttcttaagtgacaatcattccatgtttctcccatttcagttagtgttttgtattttggtgtccactttaggaaatccttgcttacttcaaaatgatcatgttttcttacatttccttctaaaatctttatattttccacttttcatacttagactcacaatcgaactggaattaattctttgtaggtgatatgaggaagaggtcaagttctatttttccaaatgattattcaatttacccaatactatttaagtggtaatagtttcaccatcactcgataatatcacttttgtcataaatccgtcattatacatgtgtggccttttttctcggatctctattctgttacattggtctgttctgtcagttctcgcactgataatatgctgtcttactacagcttcatccttattcttaatatctggtagaataatttctcaagcttcgctcctttttatcaagtgttcttgagcactcttgacactttttttccatatacattttagaatcagcttgctaaattattcaggaaaaagataacaactgctgggattttttttgtttttgtttgtttccaactgatttaagtgcatcacagaacaaagctaaaaatattaatagaaatataaaaatatctaccacccaaaaatataaaatacaaaatatctggcatcaatcaaaaattacagacctgcaaagaagcatgaaaataggatctataaggaaaagaaggattaattaataggaaccaactcagaaatgacaaattggcagacaaagacagtcaaacagttactataactctggtctgtaagttcaaagttttgttgagatggggaaaggcataatgagatccaaacaaagcttctagagataaaaattacaatgtctgtgatgaaaaatacgctggatgaagttaccatcagattagacattacaggataaaatattaataaacttgaagaaataacacaaacaattcttaatgaaatacagagaataagtgggggtcatcagtaaactgggggacaactttaagtagcttaatatgtaattagagtcccaaaagcaaatttttaaacttgaatgaatttctttaaaggataattggctatttacactgaaataattccaaaacagtgcagggattctaatatatgcaaacataaatctataacaagactagcataaagacaggtgaggaataaatgaacacatatatcattggaaggtttccataatctgagtgaagtcacttgaaggcagactgcgttaaagtagagatgcaactgaaaatcatagagcaaccactaagatgacaaaacacagcattatagttaataagccaacacaatacagagttataaaaatgctcaaataatccataaaaacaacataaaaagaaaaaaggaatatagaagagatgggattgatagaaaacaaatagaagatgatagacccaaaagtaaccacatcaacaatcacatcaaatctaaatagtctaaaagcacagattgtactattgaatattatcgaatcatatcaaaaaaacaactatatgctgcttatcagaatactatgaagactcagaatgtaaaaaaatataaaagtatggaaaaagatgtactatgccaacaccaattaaaggaaagccagactagtaacgttaatatcaaacaaaataaatttcaagcagagaatatcatctgagataatgaaagtcatatcctaatgacaaaagtattggtctatcaagaggttgtaacaatcaaatatttacgtacctgaaaatggatcttcaaaatcccaaggcaaaaacagaactgcaaggagaaacagacaaatccacaattataatcagagatttcaatagccctcttttagtaactggtttaacaagttgacaaaaacaaaagacaactaaggatacagaagatatgaactacaccaacaaccaacttgacttaattgacgtttacagaacacttcatccaacagcagcagaatacatgttctcttggagtgcgcactgattgtgtgccagcatggactacgtacactgggccataaaacaagcatccatgcattaaaagtattcaagtcaaaccaagtgcactcgctggtcacagtgaaacttcattaaaaatcagtaagagaaagatttctggaaaagtcccgaatatttcaaaattagataatagttgtctaaataactcataaagcaaaaaataaatcaaaagataaaagataatttacaattattttaatagtatattttggtcattttttttttctttttgaccaaatactggtgagaatgaagataagtaagacctttcttttttattttttttttaagacggagtctcaatctgtcactgaggctggggtgcagtggcatggtgttggctcactgcaacctccgtctcctgggttcaagcaattctcctgcctcagcctcccaaatagctaggattacaggtgcccaccaccatgctcagctagtttttatatttttagcagtgacggggtttcatcatgttgggcagcctggtctcgaactcctgacctcaggtgatccacctgcctcggcctcccaaagtgctggggttacaggcataagccaccacgcctggcccaaatctttcttttttggggtgagagtaaattgtaaaaccgtttttgatgagtaatttagcagcatacatcaaaagagttaatactgctaacactccttgacccagagtgttttttatttaatgaatttatttcaaggaaattgctatatatgcataaaatgtttgagaatgttcaacagaaaagaaattattttaaactgaacaaatataaaaatatatcaaagttggtatgatgctgccaaagcaggactgaggggaaactgaagaacaggggataattttctattcattctgaggccagaactactctgataccaaaacgagactaagagattccaagaaagctgctgactaatatctctcaggaacacagattcaatgatccttttaccattacagcctagagaatctgacaatatgtaagagggatagtacaacatggtcaagtagggtttatctcagtaatgcattgttggtctgacattcaaaaaacagactatgtcatttaccttatctgtatgaaaaatatgaaaagtatatgatcatatctatagataacttaaacatttgataaaattccatatcctttcttgaagaaaactgttatcaaactcagagtaacaagaaattttcttcacctaaaaaaggacatttatgacatcctatggttaaatagaatatttttgcaagcaaactgataagtcaaagatgcatatgtaattcccagatcaaatactagaaacagcaaaaagaggataaaatagccttttcagcaaatggttctagaaaatgggataatatggaaaaataatgaatctctagccttatctcactccataaccagatgtgggcaaactatggcctccgggcaaatttggcctttgtctgttttcatacagcccagaaactaacaaaaattttacacttttaaatgattgaaaaaaagtaaaaagtattttgttacatataaaaatctaagatattcaaatttcagtaaacataaatgaagttctattggatcatggccacagtcattcgtgtatatattgtcaatggttgcttttgcactacaatgacagaattgagtagtcgagacaaatactgcatgatgcacaaaactaaaaaatttattatttcaccctttacaggaaaactgctgacccttcccataaacaaaatttagtaagagacacaaaaaaaatcccagataatcgaaaaactagaaactgaaagcttcctggaagaaaacatagcaagctctcttcatgatcatggggtaggcaaagatttcttaaggacaaaagaatgttctaaccataaaaaaagcaaattgttctttatgcaaatcccaaaaagttcttcaaaatacattacgaaaaaataaatgtatatctgagaaagggctggattcatattataaagaattcctacacatcaatcataaagaaggcaattcactaaaaacaaaaagttgactagagaattaaaaaaaaaagatatataagtaggcagtttcttttcatgagactaatgtgtttatttctccagacttagatgattgtttcactgatagcatgtcactgtcagctgcctccaggaattatctttggttaaagggaatgctttgcccaggtctcaccccattcctatggcagctggcatttaatgactggctgatatctcccttcctacaccattatttgatgaaatttaaaatttaaattaaaatgaaaaatttttctttcttgtttagaaagacatttgctttatgtctccctcaccaacctgtgcaaaatttgagtttgaggcaggtaaacctgaaatcagcaagagctgtgctgtgtcctgagagatcccgatggtctaatttaggaagcacccagtctccctagtcagggtccttagagcttcctcatagtgactacacactggccacttgggggcactgtggatccactgagtgggtcactgatagcgctgtctgagagagagagggttaagggagacagtcttgatttcgtctctgtatcagggatattaccagatgaaccagaggtactgctggcacaggaagagttaatcatagtcttatcagatcaactgatatgcaacgtgtatttgtcatgacaggaagccatgaactgaagccttgtgtggcctctctagcaacctaggtttgatggggagtgtgatgagggtttcagcagggcagcctggataacccaagccaggtggagataaaggagcatctgcctcagatgaaaatctcagaagctgtgcggatggctgtctgcccggaagcctgccccctctgctcagcacagctagcttcccctgctctgcaggaagctggacaggatgggggaaagcctgagttagctgagctagtcctggagtacagggtgcctatgggagcctacaggacgatgacatcagaacagtgacatcacagtaaaaacctccaaaaaacggtgaggaggagcaaaagccctgctttctcaccccaggagaccagcaacctgagcagggagatgcttagtcctgacctgcctgactctgcctggaacaccaggctcctctgccatgtcatgctttgtctcctgggagcaggtgagtcctgagtacaggtgggacatccctgtatccacagtgttcaattgttgctgaagtgtcaaactctcccgagctgagtcttcagcttctgtctccttcctccacagtttcagtggctgctggagtcatccagtccccaagacatctgatcaaagaaaagagggaaacagccactctgaaatgctatcctatccctagacacgacactgtctactggtaccagcagggtccaggtcaggacccccagttcctcatttcgttttatgaaaagatgcagagcgataaaggaagcatccctgatcgattctcagctcaacagttcagtgactatcattctgaactgaacatgagctccttggagctgggggactcagccctgtacttctgtgccagcagcttaggcacagaccctggagaattactggctttctgtacccaaaccctcctatctcacttgaggatgtaatagggagaaggaggtgggggctgccacacaactttagccaagccccagagatgcttctattcttttctaacattttcccctgccctgctgagctcagtgagagctcctgcacttgtgggctccagacccactggaagttctcacatcttagccagtactttttaattcctagcaagtggcgggagcttctactctgtgccaacataggggtatatgttttagtgtgtttcctgttgccatacagaatacctgagactgggtattttataaagaaatgaaatttgtttcttacagctctggaggctgggaagtccaaggtcaaggacccacatctagtgaggaccttcttgctggtgaggactctgcagagtcccaggtggcatagggcattacatatgagggggctcatgaaagatggtcaaactggcttttataacagacccaacctcataactaactaattccttctataacccattaatccatgaatggattaacctttatgagggcagagtccttaagatccagtcaccttccaaaggtcctacctctcaacgctgctgcattgggaaccaagttttcaatatataaattatttaggaacacagtcaaatcatagcagtacacattgcgggttttttttttttttcttttttgagacagggtctcactctgtcacccaggctgaagtgcagtggtgctgtgatcatggctcattgcaaccttgagcgcgtgggttcaagcaatcctcctgcctcagtggcctgagtagctatgactacagggacacatcactacaaggtgtgtccccagttcctcagttcctacaaggtgatgtgtccccttgcctggctaattttttttaatttttatttttgtagagatgaggccttgtcatgttgtccagattagtctcaaactcctcaaatgatcctcctgagtttatgtgttttaatgcaaagatagacattagcatatccactttatacatgtagaagatttcagtgtaccattttatagataggaagctgtggctcatgaacttctccagtatttcatatttccaaggatcaaaggcaggatccaaacctacgactccatgcctccaaaataaaatttctaaaattctatagtgtttcctgggccttggtcaatgagctacagcagagcactattcttccatctcaagactagccaagcagtagaagaaggtcacatattatggaatgtggttactatggcttatggcctgccaacctccaggacatataacttccagccagagaatatttgtcctgttttagttccatatagaatggggccacaatatgtcctaatatagacatatagtgacaaggggcatttctaatacatcacagggttcagtcaaggaaacagaatcctctaggaattccaaggagaataggagttaatacagggaattagtggttataaaccactggaaggctgaaaagtgggagggtctcagaaggttgaaacttgcgctcaggtccaccactagtgatcacaaagactgaagttgctacttttgcccaggtcagggactgctggaaatagctgagagtcatagtggtcttgcagtgaccaagagggtgattcacaggaaagtatccagaggtcattgcaaatccacctgtctgttgctgtcagataaaagtctttattctgcttctaacttttccacaagtatagcttactgggggaaacaaaactgttttcagaaacttgctctcaggagaatctaggaaatgtctttttcttttttttcttttttttttttttttttttgagatggagtctcgctcagtcgcccaggctggaatgcagtggcgcgatctcggctcactggaagctccacctcctgggttcatgccattctcctgcctcagcctcccgagtagctgggactacaggcacccgccactaagcccagctaattttttttgtatttttagtagagacggggtttcaccatgttagccaggatggtctcgatctcctgacctcatgatccacccatctcagcctcccaaagtgctgggattacaggcgtgagaccatgcctggactgggaaatgtactttcaagtcttctagctcttgcaataagagagagagagagattgttggaggacatttaagggtactcagtgccaaaagacaatcatcagcacacccagctatgcagcagagaaatggaaagcaggagaataaattttatattttctgtcaaattgttacatgaaaatttattttatatatatagctttgctgttgtcatttagttgttgtttacttgttaatttattcagtagatattcctggaatacctattatgttaaaaatttccttggaatacagaaaatgagatgtaatttttcaaattacacattctgtctttaagaagtctaaagtctggcaagataatatatccctaattattcacacatgcatttacaatgtatgaaagtcatttcaatcagtcagttttctggcaaggaacagatgacacagtcaaaaaggctgaagtgaaaacaatttaatcgaaggactatgtttagaggggtaaacagacttagggacaccaagaagtgtttgagggaccaggggtttccagcacattgggaagccagtacaactaactgtggggcctatggaaaaaggggtgggagggaaattctgtgttactggaggtgcatgcaagtaatgagaaaagtttcccaaaggaaggaattcaggaccagagctaggaaggggaagcccagatatgctgaactttctcttcactacccttcaatgtccagctggtgtcttccattggaaagcccagctgaaagcctggatagcaccgtttgctgacatcagtcttcaggggcacagtccagggcagtaaggggcaggcaggcgagagtcggttgtggggaactttgggtgtgcatgtagaacagccagcacagcagctaccaagtgtatgatgtgccatttgcagatgcatgtgcaagtacacggtggacagagaccaacttaattctacatcttttatgtgaacttagagaaaattgccttgttgattgctaataacaagcaacatcgttaatcccattttctctgggccatataccaagtacattatttcaattaatttcttaagaacttcaaaagggagaacaatttactcccatattacaggtaaaaaactgttagagaatttagattttctaaaggaggtacagctaacaaatatagaacttagactcacacctaggccatactgactttcaacctatgcttgaaggttactccaccctatacattttggtagaggaagataccttcaacattggaaatctaaatgtctcttttagaaacaatgcatctgacacaaaccatttgaataacatctttcatgtgggaggctgcacgctaaagaggaagatcctcagagatgaggagacctcagtagttcatcttctgatcccttgggtcagtgactttgaaaacatttggctaaactgaggccaatcatatatgtcttacagagattttatacatgtaaataaaacagagtctaatacatagtataggctcaataagtcttaggtccctatgaattttctgacaaatctctagtcaagcagttatttactttggcaatctggtaacaaaggcatacacgaattacttttgtctgattcacctatgattcagacacaaagtcatctaaaatgcaaatatagtagtctgataattcattggcaaaagtaacacaaacagttgtgtcttaagagaaagtgaaaatgttgtaccttacagcatttcctgcttgatactgagtctgatatgcaaggtgtgatgctcccagaaagttgtgaattcagagcaatcctgatggattccatctcctgttgctccagcacaaactcaatattgtacctttatcctggtttcctctctccctattttattctcccatctctcttattcctaattcctgagatcctttccaaaataaactactttcaccaaagtccatgtctcaaactttgccttcaggggcagcttaaaactttgacagtgatagaatgagatgaccctctaagacacttctctttgaaaaaggccgtggttttcttttagttacactgccatgcattcattcagaagtcctataatgatatatgaactatctcttccaagttcattttgactcagtctgagtttccaacagactcacatgggtctctgctcagttaaggctctgagcttatttgtaactgaatagactaagtttatgtttcacagcttcagggtctgcatggactcagagaaccattcatttctttcttcagtcattcaacaaaaatttaacaagagtatgtgcggagtagatccaagttttgcggaacatgaggcttataaaattttagggatcgctttgaaaaagagaatacaaaatgagaatgtcttgaaaaaattctgtgcaaggccaggcacagtggctcatgcctataatcccagcactttgggaggccgaggtggttggatcatttgaagtcaggagttcgaaatcagcctagccaacatggtgaaaccctgtctctactaaaaatacaaaaattagccaggcatggtggtgggcacctgtaatcccagctacttgggagactgaggcaggagaaccacttaagcccaggaagcggaggttgcagtgagcagagatcacgccattgtactccagcctgggtgacagagtgagactctatctcaaattaaaataaataaataaattctgtgcaagtgagaaggcctgaagttattcttcattgacttcatggcaaatccacttctagctagttaccgtgtgtaggcaccatgtaagtgcttgagaaacatcagcacagaaaacaggcaaaagctgcaaaataaggtgtatgttttcaacaaaagaaaattggtaaatcaataatgatcaagtaatacaaatgtaaatacaaggaaaatattcctggtagatgtttatctccccagagaagtcagagtattgttgagaattctattggtggatcacaccttatttattgatggatcacaccttattttgataacaattctcagagctcttggattccatgtgccctactctaaagaatctgagccctgagatggaaagctctcctttcctgtcctgactcaaccatgggcaatgatctctttttccgtgtgccttttggtctcccaggaccaggggagttctgggcatagatgggaaagctcttcctgggctttccaggccccagccacagcctctccatcggggtgttcatgggtcccctccctgtctccacttcagattctgtatccattctcactggagcatgagtgtaggaattacccacccaggttacatcaagatgtgcagtcacaaaaagggatcctcacactgagatgtgtcctgtatctgaaataacagtagtaccactattgactagatgtaaattttgcaccacagcacatttatggttcaatcaatatcctcccatttgtatttataagaccttctgaatggacacagggcatttccctatgaccttaaaggcaccaggctagtgtacttctgggcaaatatctcatatacatccctaatgagcttcctcttatttttacacaaaagaaaaaaaggagggtgggttttccccacatagtccatccactcacaagccaatctcctgcagaaataccctcacagatagaccaagaaatgctgttgtaccagctacctaggtatgccctagcctggtcaggttggcacctaaaattaaccatcacaaaactcatgagaacacagaggtctgagttctgatgatgagactcctattaggtgatggagactcaggtggcctcccctaaaacaaaaggagaagtcatatctgtattagtcatacatatgtgtatatgtacatacatgtatgtattctgttggttctgtttctctctgaggacgaggtggcctagatccttccctttctgggtaaagggtggaagcagtgtggatcattacttagtgtgttctgatagccatgtgtcactatgtacttgttctttgtgtcttcacatctcttcctgttgcattttaaagcattttcatagtatgtggtgttgcctagcagagcattctcatagcaaaaaaatgtatatatatatacatatgcatatatatattctattggttctgtttctctggagaaacggtatatatatatatatatatatatatatatatatactctccctgtatatatagtatatatatatatatatacactctctctctatatatagtatatatatatatactctctatatatatactctcctatatatagtatatatacactctcctatatatatagtatatatatatatacactctcctatatatatagtatatatatatacactctcctatatatatagtatatatatatacactctcctgtatatatagtatatatatatactctcctatatatatatatatatatatatatatatacacacactatatatatatatgggaagagagagagagaaaaagaaagaagagaagagaagagaagagaagagaagagaagagaagagaagagaagagaagggaagagaagagaaggaaagagattagggaaattggctcacgtgattatgaaggctgaaaagtcccccagtatgccagccatctgcaagctggagatgaagcaaagccagtagcatgactcagtccaagtttgaagccctcagaccacagaagccaatgttgtgtctctcagcctgagaccaaaagcctgacaacccaggggattgctagtgcaagtcccggaatccaaaggtaggagaatctagaattctgatatccaagggcagtagaagacacatgtctcatctctgagagagaatgcaaattcaccctttctgtgcctttttgtttcatccaggcccccagctgactggatattgccatacacattgagagtagatctttcccacacagttcatcaatttacaagccagtctcctccagaaataccctcacagacataccaagaagtgttgctgtaccagctatccaggtatgccttaatctagtcagattaacacctaaaattaaccatcaaactaccagcgggaacacacagaggtctgagctctgatgaggagtctcctgtgaggtgaactaatgtgacagggcataaaacaatatacaaattgtattgatcctgaccttaagactttttgaaaccttcccagatgtcaggtggctcttttaacagaggccagcactgtaggctgacatccagttatccagagtttgagaaaagataaaatctagtaaaaggtacttagaggcaaatttgaggagatgagttataaaggacaccagactgccacgagaatgtcccttagactacataaatattagaaacaattaaaacagcatataaatgaggaattgtatcctaatgggaataaaatatgcagagaggaatgcattttctttctaataacctgcaaagagcatatgcacttatgtctttaaaaatagtctacaaattattcccattctgagctgttaaattgtatatatgtcctataaaatattgttgtatataccataaattacatatatgtatatatttgatttatttttttggagaatgtaaggggtgtggcaggttaactttccagctcaactatttgtcaggggcactgatgtcatcgagtcactgagaacctaagttctatttccccaggcagggctgggagagatgagatcctggcctggacctgaaatgggcacaaggttgttcttctatgtggccctttgtctcctgtggacaggtgagggctggtcacaggtgggcttccttccctagaattcccaaggcctcaatacaagtctttttcttgggattacaacatcagggtctgttgttttctattacaggacacatggatgctggaatcacccagagcccaagacacaaggtcacagagacaggaacaccagtgactctgagatgtcaccagactgagaaccaccgctatatgtactggtatcgacaagacccggggcatgggctgaggctgatccattactcatatggtgttaaagatactgacaaaggagaagtctcagatggctatagtgtctctagatcaaagacagaggatttcctcctcactctggagtccgctaccagctcccagacatctgtgtacttctgtgccatcagtgagtccacagtgctgcatggctgcctcctctctgcacgtaaacagcagttagaaagactgaggttgctctgtgtctatccccacccttggaagtccaggcctccatagaagtcagagggccctggccagcctggaagccatagagcaggggccttatgaccctcagtgctgacgtccattcctaccccagtctcagaccaactggaggtcaccccaacacacttagcttgccaagtctctcttctgcagctctcttttgctgcttgcagaaaggaaaaggcatcattagttgaggttagcgatgattctcttaaccccaaagcctggactcccttctctcccctttgggcttcagtgacttcttcatctgcccctttccccagctccactatccttccactcatagtcatgaaccttcactcctgacctctgttcctggctgcctttcttctatgggccaatagcctcatggggccctctatcatttgctcttcacctacatctccatcatcattttgcacaagtctcccctggctctctctgctccagccatgctcctttatgttcagttatttcctcatatgtgttatgctgtttcccaccctggggatgtgtgtttttacagattatttcttctacactgaacatatgttcctccctcttattcctaagtctctacttcatttcttacatgaaagtatatttcaggtacatttactcttaactataaacagaaaaacttaaatttcactaaaagaaattaaggaaaatatttttatcctttgagtgaagacttttttagtggaaacacaaaagaacacatgccataaaaaaataatactggatgggcatggtggctcacacctttaattccagcactttgggaggcctaggcgggtggatcacttgagcccaggagttcaagaccagcctgggcaacatggcaaaacctcgtctctactaaaaacacataaattagctgggggtagtggcgtttgcctgtaatctcagctactctggaagctgaggcacgagaatcacttgaacttgggaggcggagggtgcagtgagccgagatggcaccactgcacttcagcctgggtgacagagcaaaactccatctcaaaaaataaaacaacaacaacaaactgacattagttgtattaatcatgtatcgaaacacatgataaaaaatgaaaagtcaagccacagcctggaaaaggcataaggaatgcatgcaaatgaggaagaatcagcatgacaccatttatgttcacaaaagtcccttggctcccctacagttccaggcttcacatgcagttaaagtgctgggaacatatgaagaggttctgaataactggatgtgtgcagaactgatgtgggcaatcccaagtctggcccttagaaataacttgtggcagccacgcgcggtggctcatgcctgtaatcccagcactttgggaggctgagatgggcggatcacaaggtcaggagattgagactatcctggccaacatggtgaaatcccgtctctgctaaaaatacaaaaattagctggatgtggtggtgtgtgcctgtagtcccagctacttgggaggctgaggcaggagaatcacttgaacccaggaggcggagactgcagtgagccaagattgcgctactgcactccagcctggcaacagtgtgagattctgtctcaaaaaaaaaaaaaaaaaaaaagaaataacttgtggcactgtgaagggagtcctcaagtagacacagaaattagctgcaaagactcatgggatatagcatacagttgcacttatggttaagatttattacagtgtcatagtaaatattcagcagcggatcatatgaagaaaacacacaggaggaatctagaggagttcacacattggcttccttatgctctcttcctcccgggaggggtcacacagagctcacttcttccagcaacaaaaatgcattaacacgtgtgcaatgtttctgcctgtggagctcatcagagactcaacaccccagaggctttagtggaggccagtcatggaggcactcactgcctagtatgaacccaaaatccacagcccagaaggaaatctcggtattcagcacaatactgtttgcaatatcagtctaggccacaatgagctactcctctcggttaggagaaactatgtcagtgcagggcactgctcaccagccagcttcccagatgtcagccaaatgccaacctcacaagcaggactttctaagcaccacagtctcaagccttgctgttgactgttttctgtacagatcccttcaattcttttgccatgccctaataaacctgggagctacgcaatacagattgactaatgataatatggaagcagcctggctcactgggtcataatttggtgaaaaaccatgaaagaaagctacttatggcctgctgggctttgtggacatgggaagtaagacttcatagaattaagccaatgagattttaagatttatttttatttttttttctgtagcatagctgttcttatctaatagagttagtatctacaatgggtaaagcattctcataacttactaagacaatccaataaaatggcaatacttagtctaaataggcatttcacagaaaagtaaacataaattaacactaacataaaaataggttcttgggctaggtgcagtggttcattcctgtaatcccagcactttgggaggctgaggtgggcagatcacttgaggtcaggggttcgagacaagcctggccaacatggtgagaccccatagctataaaaaatacaaaaaattagccagtcatggtgggatgtgcctgtggtcccagcagctactcgggagactgaggcacaagaatcacttgaacctgggaggcagaggttgcggtgagccaagatcaccccctgcactccagactgggtgacagagcaggactccgtcttaaaaaaaaaaaaaagaataggttcttaacctcacttagaatcagagtattccaatctgaaacagtaaattatgaatgcaaacttatcagattttgaagactggaaagtcttcaaagaaatgatagtcccaaatatgagaaaagatgtggactagtggaactgtattatactacagaagaaaattataactgatatggttttgttctgtgtcgccaccctcatctcaaattgtaatccccatgtgtcaagggagggaactggtgggaggtgattggatcatgggggtggttttccctgtgccgttctcctaatagcgagtgaattctcacagggcctgatggtttatgagtggcagttttcccttctctttctctgtcctgctgccatgtgagacgtgccttgcttcccttctccttctgccatgattgtaagtttcctgaggccttctcagccatgtggaactgtaagtcaaataaacctctttcctttataaattaaattacccagtccctggtatttcttcatagcagtgtgaaaacagactaatacaataattatatcagaaaaccctttctgagatatattctgacaagcaacattttgaaacaaattagcaatatagttgaccctctatatcagctgatttggaacccaaggataccaaaggctgacggtaaggaaggtgggcacccttggattaggatatcagcagggtttcctggaaccaatcccctcaggatactaagagatgactgtgtgtttaaattacttgagttcctttcattgtctttagggtccatcatggagaattgagttgtcaatatttattttagccattttgaaggttttaattgatatttaaaaattaacacttaaaaactgtggttatacatatatgtataaccatggttttacatatatatatataatatatagtatatacattaccacagttttatatataaatataaaatacatattaccacagtttttaaatgttaatttttaaatgttttatatgtacataaaacatacaatttttcaccttaacaattttaaaatatacaattaagtggaatcacgtacattcacaaggttgtagaaccatcactgctgtttccaaatgtttttcatgatctcaaagagaaactacacccattaagcaataactccatctttcccatgcttctcagcttctggtagcctctaatctaccgtttgtttatatgaatttaccaactctagatagttaattgatgggaaattataaaatatatctccctttgtgtctgtcttctttcacttagcctaatgctttcaagattcatccatattgtagcatgtgtcagaattttactcctttatatagctgaataatacttcatcgtgtgtatagaccacattttgtttatctcatcatcagctgatggacttgtgggttgtttccaccttttgactattataaataatcttgcaataaacactggcctacaagtatctgtctgctttcctgctttcaattattctgggtgtatacctaggggtggaattgctgagtcacatgggtattctacatttgacattttgagcaactgcccaacagtgttttacagcagcctcagcattttatattcccataacagtgtaaaagccttccagtttcttcacagccttgccaacacttaatttctgttttgttcttctttttaaaaattattacagccatgctggtaaatgcgaagtgatacctcattgcggttttgatttacatgttcctaataattaatgatgttaagcatctttttttgaacttttactttaaatttgaaaattgtattatgtatacttcaggtacataacatgatatgatgagatacacacctataggaaaatggttactatagtgaaacaaattaatatagccatcatctcacatagttacccatttactccctgtggcaataacagatataatttactcatttagaaaaaattctgaatatatgaactatagttttcatgtggcacattagatctttagacttcttcatcctgcctatctgctatcttgtatcatttggcctaaatgttcccatttcctattccctccccctgccatcctcccattaaccactatttcattctctctgtatatttgagtttttacaaatttcacatataaataatatacactatttctctgtgtctggcttatttcacttagcctaatgtcctccaggttcatctatgtttgttgtggtaaatggcaagatctcattttttttttaggatcaaataatactccattgtatatgtatgccacagtttcttcatccatttgtccatcagtagacacttaggttgtttccatatcttggctattgtaaataatgctgcaatgaacatgggagtgcagatgtctccaaaaggtgggatttcattttctttgtgtatataccaagaaaagagattgctgggtcatataattctatttttaatttctttaggaacatctacactaattttcttaatgagtgcatcaatctacttttccaccaacagtgtataaaagttcctttttctctacactcttgcaacttatctttttaataatagctatcttaatgggtgtgaggtgctatctcatagcagttttgattttcacttttctaacatttagtgatattgaacatcttggccatttttatgccttcttggtagaaatgtctgtttaggtcctttgctcagtttaaatagggttatatgttctcttgccaaagagttgtatggggtctttatatatttggtatattaatctcttatctgacatatggtttgcaaatattttttccaaatccataggttgccttttcatgttgttgattgtttaatttgctgtgcagaagcttttcagtttgatttagtcccatttatttttgcttttgtagcctgaactttttgtatgatatcgaagaaatcattgccaaggccaacgtcaaagagcttttccaacatgttgcatgtaataaactgaacttagatagaagacctaaacattagatattaagcatcttttcatatattattgatcatttgtatatcttcttaggaggcaatggcttttcttttccagttgttttttagtttttctttgtctttagattttagtagttttatgattgtaaggctaaatgaggttggggttgaacttcacttgggagatttgtcgctgttagtgtttttagtgcatattctgaaacatttttaatagactgtacaacagagaataagtaaattcattgacattactgggaaacagagttcttacaaagggaagagagatacaataagaaatagggaaagacaaggaagaaatctgtggtgtttatttgaattggaggtatcaaatatgaactattatttaaaaattatgtatttcctaactctaaccatacaatatgtaagaagcaatatgaagtcgatggacaattgctttatttctttgtacttgtgttcccagtagtaatgggcagaattattgcatgttatttaatttctaaatgtttctaaaagaaacaaagcagaaatggcttcttctagatccagagcagggaaagtcaaaaacatcttttggcagaaatcaaggaagtttcatgacccagaaaacatagaaaaaagccacagaaccagtttcatggggctcccactagccaaacacgagtatctaaacattagagcataataatgaggacactaaattataacaaattttaaaaatctataaggctataatgacaataaaaagatgtaggtaagaatgtcttcattacagaataatgctagttactaaatttcattagaaaatcaatgtagccattaatgtagttacagacagagaccatcagttgatgtcaaaaccaacatctgaaaggttattggagaccaagatatctatattgtgtcaaagtatcactccactaattgcttattaactataaaatataaatgatatctttgcaatggagagatctgatgtctgtgatgttaaatttagtatcgccaaaaatgtgtaaagacagcattatatgttcttgtaattgatcggatgcaatgggaaacacacatcaactatggcatggtatttgccaaaatatttaacctctgataatgtggaaattctgattgggggtcattttaccagtcagctgacatggactcttacaaaaatcaagaccatgaaagttggaaaatataagtgggccaaagagatgtctagtttaaaagtagctaaaaagacctgacaaccaaaagaaatgcataatctttgataatgtcctgtagaaaaaaaattaaaaccaaaagacacattggtacaactggagaaaggggaatgtgaagcatatatgagaaaataatgttatatgaatattaagtttttgagtgtaataaaggcatttgtggttttctaagataatggcctctttttaggagagacatactgaatcgttaagaataaagtgttttatttcagaaattgagggtaaaatacacaaaaagagataaagcaaatgtcaaaagatgttaataattgaaatacattttaatattctctttgttgtatgattcagctcttccaaaagtgtcagttttttaaataaaattagaagaaaaaaatcttaagatcttgaaatgttggcatgatttcagttttgtggtggctatttattatattcattttcaatatctttgaaatattctataattaccataaaacaaacacacaagataaggtttcttttagccctatagtgtactttttctatagggacaggctatgatttttaaaagtccccccaaaagataagagaatttatagtctgaggacaaaatagctgatatctctgagatgagcacaaaacttagctaacaatgcatgtcaagaagctgtttagtaaatacacaggactgttttaactgaaacaggagattctgagttccctacaggttggtcaagaactcacagatgttggggaattgcctgaatgtaagcagaggagtggtagtgcttgtcctaaattgtggttggataatatgtgtttgtgtaacagggagggggctctagcaggactgaaacactgtctgtggggaggagtctctagcaggacagaaggatcacatggagctggaatgaattcccttcagtcccccacaaacactgtctgatagtagccctgatctaatttccattgtttagaagtcccaccactctccctgagccatggctggagggcctaagcccagtggctctgaaccattggccatcaggaggcactgaggtttgatggcgtccaaatgtttttgaaacagggctaagtattgcctgagaagttgagtttaaaggaaaagtgtggcttcatcctagcattcagtatctagtttgcaggtgttttgagtggtcaatggaaactcatctttctccactgatgccagtgggttctgttcggcagtgaaatctgaactgtagcaaaccattgagtggagaatcttctgagcccacttgaggggtagatggaggagagccaggagccaacctgaatgctcacagacccatgcagaggaacaagtgcctccttgggagaacatcagagaaaccttagcacctaacctattctagtgtgtcctggacgatggacaggagaatgtaaggggaatgtagaagatgggagtggacaactgtagatgtttccagatatctcaaattgcagtaacaccacaaatattcttaacaagaaccagattttccagaactctggcatttccttccctgagcaatgagacggccctttgggccctgacacaatcatgggtgttttttgttcatttgttttggtgctcaggaagcaggggaggcatgagaatacctggggaatgtctttcctagaaataggatgccccaatttcaagtatttcacatgcagcttgataggtcctgtctccagccacccagcctccactctctcaatgctgttgtcatccagggccctaagctctggtcacacggacggaagaggtagtgacactgtgatgtgaagacactttccaccatgaaattattaattggtgtcaatataaggcaggctccgactagcagcttttctaccacaatgatagacaatttatatggaaaagagatggttctgataattctacactcacaggtcttcacctgataaccttgacatgtgtcccctaggttttaggaacttggatttctttaggctgagttgtactattccctttctctgaacacacatgtcattggttagttcattcatattgattctcagggcttctccaatccctcaagccttcccactctaccactcagataaggagaagtgtgtcttaactaatgttgcataattttttaaaaattgctggatactaacactgcaattcaattgtaaaatatgatagaggtgtaagtgttttagatcccagaagtcctgctcaattttgcatttattgttggatattcaccctgatattttcaggaattagagtgttcttcacccatttgggttaagatatcagaacttactttcaattcattggtgaccagagactacaggcagaatcatagtgaaggcttgatacataatacataatgaagattgataacagcaaaaagggaactagtcattggccttcagataaaatgaaacctcccaactttgtgctcagggaattattttacccctttaggttagagtatgtcagctagttcaatgcagttctaggataaagctgtgtcaattaccctagaggactgggagcatggaggacctggtagaaaagaaatacccaaagagaaggaaaattacacacaaaatcaagaggtcactaattgatatatctattttgagttgcctttgagacttccacgtagaaacatctagcacaggataggcctagagatgtagtgacagatctaatcccccaagccctgaatatgtgagtgaggacgcttggatgaacttccagtctatgaatacattaaacaaacttttagctctgttttagtttacaacaactgttttctaagaacttaagcatttgtggagacaatgatgtcactgtaggaacttctctgtaaggacagcaacatcccacttcctctgctcctgctcacagtgaccctgatctggcaaagcttccatcctgccctgaccctgccatgggtaccaggctcctctgctgggtggccttctgtctcctggtggaaggtgagtcctaggaacaccatgatcctcacataatctcccagtgattattctagtcatttccttctattttaaaattctttttcccccacagaactcatagaagctggagtggttcagtctcccagatataagattatagagaaaaaacagcctgtggctttttggtgcaatcctatttctggccacaataccctttactggtacctgcagaacttgggacagggcccggagcttctgattcgatatgagaatgaggaagcagtagacgattcacagttgcctaaggatcgattttctgcagagaggctcaaaggagtagactccactctcaagatccagcctgcagagcttggggactcggccgtgtatctctgtgccagcagcttagacacagtgtagcagagacacttccctcctgtgcagaaaaccgcaggactctctcctctctactcagctcacagcagcctttccttattcctcatcctcccaggaaagaagtgagttttcagatatagctaggattcatatagtgggaggaaatgaactatttcttacaacatgagcgctataattgttgcttgaaaatgtgtctcagggatttgaaacacttcttggggacaactcaagaaacctaaagtgacttatcagagattgagtcctcaggggtagtgatggtttatctcccataaaagtatgtgatcatgaaacatgtacaataaacttaataatacagatagtgattataccaagcagcaaacagcaggctccccttatgtagttgtcagcatgtgaatgacttgttacccttagtgacaccccggctgtctagcaaagtctcaacacacagtatgtgtttggaaatctttttccttctgttttatttttggtaaagtatgctaataatgatgttgttaatgatagtgattataatttcaggtatgttattcagccctttttccagttcaaagaaatgcacacaaatggataccccggcaaccaggtgcaaatcttagctccagatgaattctacttctcctgaactctctaactcttctatgtaatcatcccagcccaagaatatatctagacctggaccagtcagttcagaggacatttctacgtgtctgccttgtatattaaaagttccttagtggattgaaatattccttgtaagaacttctgaagcaatcaattgccctctctgataatatacactctgtgtgtctagctccatattcattactctacttctgcctaaactctctaatactagaaatctttctgaagtattggttagaattacttaaaaagcagcatactggaaattgtctgaaagcactgtcactgtccatttgcccctcctgacttccctcccctccttatccaatctaatacctgatggcaagtcaggctttatttccatttgttcattgcacatctccctgtcctttattcctgtaataaaacctcactgatgtgatggattaaaatgaccactcactcaccatctccttgtcaaaatttctatttttttcttttcccaatctgctatgttagttatagttaataactccctcataacattttctgagatcactttttattatttgaatataggacacacagttgtttcagagtctgtctgatcattttcacctctaagatcttcataggatatttttgtgattttctttttgtgctgcttctcagttatggtgcttgagttttcatggcatttgtatttctccttaccaatctgatgatgtttgacactttgccaaacactatagttgtagaaataattttgggggtaggatggatatttttctgcagagatcatttttctgtgcttctgaaagtgcatgtagatataaacagtcaggctccctgaatcacagtttaaggcttgaggtgtcctggagcatctggagaacaggtttgtctctggcttattgttactagtggaatttggcaatgacacgttcggtatgttctgggctttgctttacccccgtggcctgtgagtcagcttcctgagtgctgagtcaggatctgcaaatgcccgctagggcaaatggactgctgtgctcacctcccggagctcttgccctcaccaacattccagcccaattattattatttttttaggactttaactaaaatttttaatgttgtttttgatattttttttccaactatgtagataacaacagaaagagtgagtgccattatccttaattattgggattaaggtgaaaataactttacctggaattctaattttccttgtattttaatgttagattctttgtgatttgtctaatattcaacttaaatggtatagagatgttaaactctgatatcaaatactttaaaaaaacttatcaagaccattcataatccaattgagacatatctttgtttggggcatgttgtttttagagtattcttctactgttatttatttctatcacataacctctgtgttccattggaccatatggcaagatgggaaagacaatcaagagaatgctgagatctggtcaaatagtacagattgggcttcaaattaatttaattactgagttctgggggtggatttgtgctgttttatgagtatttcctggggcaatggtcaaaattagagggagtaactgatatgtggctattgttttaccccgtttaaagccaatctcctgggacaacacaccccattttgtggggcaccccgaaagtaataatcctgttttaatcttcctattccttgccaaatcttctctacagaagggaaatcagttatactatttcctctcttcattttagtttagtctctccttattttcccgttttcctcctggttccctagagaaaagtagattattttcaacatgtgctaagatcagtgaggaactctctcttccatgcagggtggcctgcagtttggaggggatagggaatgggttaaattctgtttcagcatcatgttagccagcccatcgagtttcacaatgagacctgctgcttatcagtattaaaactgacattatgtttccacctttctgactgcattgtcaatgtctggggtgtttctgtcctaccccatagcactaatattatttgttggccttttaacaccaactaatcataatatcctatatcccttgtactcagtgaaataaagctcaagtccctgtgtcctggcaaaagagagcacatttgtgctgttctgcctactggccactaggaggcactgtggcttcgatgtcatccagagtctatggggaggagctgagattgctccctggaagatggttaagaataaccccgaggttggacctaaattcagggagttggtttgcagatgtcttgaatgatggctgggaataaaggaattagtaaccgacgcttcctccattgtagaggtgggttttgctttaaattgtgctttgagtggggctgagtgacaggtgtactttgcagtgcatatacctctgagctcgcttaagatgtaggggcacaaggagctgaggtggtgcagggcccatgttctgagcttggaaaaccagagaagcagttcttgtgtcaaaggagccttggagagcctggccccaaaccagcccaggccaaccctacctgctctgtgagagtagaacagcaagaaagggaggtgctacccaggaccacagcagagggaccctgtcgccagggagatgaaaatcacagtgatgccacgaccatatccacgtatgaggcatagtccagtgtgtctcctggaagaagatgaagcctgggcagacataagaatatgtttttgaataggcttcccttggcctgattttaaattccttccatgtgatcatgcatctgtctgtacctgtattttgtacccggcttctgcctctcacccatcagtcccatggctactagaaggtattaaatttctattgacaaaaattaccactaatttggtggcttacaacaataaaaatttattatcttacagttctggaggttagaagtccaaaaccaggctaaaatccaggtattggcagggctacattccttcccgaggctctcagggagaactatttttctctcctattcagcttctagaggccaccagtgttccttggctcatggccccattcaatcttcaaagccaacaaggactgggtgagcctttgctcactctgcatcactctgacactcactcttcatcctccctcttccacattttaggacccttgtgattacattgggcccatctggaaaatccaggacacgctccccatattaaggccagctgattagcaaccttcattccatttggaacattcgtttctccccttgccacataatttaacacattcccagtttctgggaattagacatgtacatctttgagaggtcgtcacgctgcctgccacacttgctacctggttacacgaagtagtaagcaattaactttttgaaggcagaattatggccatagttttatatcctggatccaacagaccctgcaaaaggatagagcccacatggaaatagcccctccagtaacacaagctagtctgcaaactaatgcccttttactttgggaagtgcttttgactgcaggggactcagaagcatgcctctgtgccaacagcaaaaatgtgcccttctcttttgttggcaagtaacttaaccaaccaacccaaaaaaaagatctttctctcagctttccataatctctgagacgaagtaggtttggagaagtggggttacaggggaaaaagccaggtgttaatgatgaaaaaacattgaacttttctaggggtagtaataagatttaattcaagactagaacattttagctgcaaatcttcaagaataagacaatattatcccctttctgttttattgtgggactagagaatgtgagagaggttacattccatgggctttgggaatttaatatggttcaaggataaacacacccaggtttttcactgcagagaagagcttcaaatataatcagttttcaggtcatcagctcagctcttgtatccctaacaatgcagttgacatgcgtcttctcagatgtctaactcctaactcactgagggatactttaagtacatataaaggactagaagcaccaagctaccagtgagaggaagaggagagtttgcagagaagctggcttgaaataagacaatgagttcatctttaaatacttgccatttgaggtgcagatggatatagttggcaggctcctatgtaaggcatgttatggagaagctaccgtgaattgataatatcaaaacaaatatccagggagcctctgcaagtgtgcatctctatttcacaccaattatagttgagttaattcctgcctgattcatctcccagagatgcagcctcctcttaaagaagttgggggtggtggcccattcagtgatgtcactgacagatgcattctgtggggataaaatgtcacaaaattcatttctttgctcatgctcacagagggcctggtctagaatattccacatctgctctcactctgccatggactcctggaccttctgctgtgtgtccctttgcatcctggtagcgagtgagtcttcagaatatttgccatcatcaggctgggcttctgcatggatgatctcatatattttccttattctgacgcccaattctgtcttctttcatagagcatacagatgctggagttatccagtcaccccgccatgaggtgacagagatgggacaagaagtgactctgagatgtaaaccaatttcaggccacaactcccttttctggtacagacagaccatgatgcggggactggagttgctcatttactttaacaacaacgttccgatagatgattcagggatgcccgaggatcgattctcagctaagatgcctaatgcatcattctccactctgaagatccagccctcagaacccagggactcagctgtgtacttctgtgccagcagtttagccacagcgctgcagaatcacccctttcctgtgcagaaaacccggtgtttccccttctccttctacctcccagcagtcctgggcaaagtctctgctgttcctccctccctatgagaaaaaagtggtttgggggtatgaaaaagacagaaaatgagaagggatcaacataggaaaccttatgttggtttgaggattacaaaatgggttttgaggattccttaaaaattgtctctgctcaaaacacataggagtaagataaaccttggctactgacactggagatttccctgccctcctgcatttgccatcccatgagaatggtgggggctcttgagaagggctgcattttctgaactgtgaggccctcttcattctctcctaactctaagctgcaaacagaaatttccctcacacgttttctagattgtaaaagaaagttcttctttactatgattgtggacgttcctttataatgccaatttcaactttacattacttcaggatttttcactactcctaaagagtgtctcaaatgtggctagagcaagcaggttagtacactagatgtaagctacctggcctggaatctaaggatccatttgtctctgttctgcgtaagatgagccgggtgctggccaaaggctgtgcacactcacagagcactgatgacgcctcctggtaaggacccacactggggtatctaaaagcagacaggcatgtccagtcttctgttgccctgtttcctttctgattatatgtccttaacacacaaatttacattttccttcttatttatatgagaagtttctatacaatacctgcaatccattctgagtggttataatttctgtgtgatattcatatttacatgctgattccttctaaatacctatcatggtatcattgacaactgaggcaaaagacccctatattttgagtgcccaaggccattgaggttttttggagctctgccataagcccaattccactgtgtcattttcctatttttctttccttttttgttttttgattagtgggtcctgactttcaagatgaaaatagtgcagaattcctccctgctgcttccagatcattttccttcctacttctctaaagcccagctgcattataggcttcctttagcctgattttaaattccttccatgtgatcatgcatctgtctctacctgtatcttgtatctggcttctgcctcttacccatcaatcccatggctactagaaggtattcaatctctgttgacacaaattactactaacttggtggtttacaacaaaaactaattatcttacagttctgcaggtcagaagtccaaaaccgggataaaatccaggtgttggcagggctgcattccatcctgaggctctcggggagaactgtttttctctccttttcaacttctagaggccaccagtgttccttggctcatggccccattcgatcttcaaagtcaacaaggactggctgagctttgctcactctgcatcactctgacactcactcttcgtcccccctcttccacattttaggacacttgtgattacattgggcccacctggaaaatccaggatacactccctatattaaggccagctgactagcaaccttcattccatttggaacattcctttctccccttgccacataatttaacacattccagtttctggaattagacatggacatctttgggaggttgtcatgctgcctgccacacttggtacctggttacaggagtggtaagtaattaaattttttaaaacagaattatgaccacagttttgtatcctgggtccaacagacctgcaaaaggatagagcccaaaggaaataggccctccagaaacacaagctagtctgcaaactaatgccctttaacattggcaagtgctttcaactgcatgggactcagaagcatgcctctgtgccaagagcaaaaatatgcccttttatggcaagtaagttaattgatcaactcaaaaaacaaacatttctctcagctttccagaacctctgagaggaagtaggtttggagaagtgggattaaggggttggcagggggcggagaaaggtcaacaggggaaaaagccaggtgttaatgatgaaaaaacattgaacttttcttttctaggggtagtaataagatataattcaagactagaacattgtagctgcaaatcttcaaaataagacaatcttatcctctgttttattgagggaatagagaatggagagaagttccattccacgggctttgggaattcaatatggttcaaggataaataaacccaggtttttttactgcagagaagagcttcaaatataatcagttctcagggcatcagctcagttcctctatccctaacaatgcagttgacatgcatcttctcagatgcctaactcctaactcgctgatggataatttaggtacacatagaggactagaaacaccaagccaccagtgagaggaagaggagagtttgcagagaagctggcttgcaataagacaatgagttcatctttaattacctggaatttgaggagatgtatatagttggcaagctcctaggtaaggcatgttatggagaagctaccgtgaattgataatatcaaaataactattcagggagcctttgcatgtgtgcatctctctttcacaccaattatagttgagttaattcctgtctgattcatctcccagagatgcagcctcctcttaaagaagttgggggtggtggcccattcagtgatgtcactgacagatgcattctgtggggataaaatgtcacaaaattcatttctttgctcatgttcacagagggcctggtctggaatattccacatctgctctcactctgccatggactcctggaccctctgctgtgtgtccctttgcatcctggtagcaagtgagtcttcagaacatttaccatcatcaggctgggcttctgcatggatgatctcatatattttccttattctgacgcccaattctgtcttccttcatagagcacacagatgctggagttatccagtcaccccggcacgaggtgacagagatgggacaagaagtgactctgagatgtaaaccaatttcaggacacgactaccttttctggtacagacagaccatgatgcggggactggagttgctcatttactttaacaacaacgttccgatagatgattcagggatgcccgaggatcgattctcagctaagatgcctaatgcatcattctccactctgaagatccagccctcagaacccagggactcagctgtgtacttctgtgccagcagtttagccacagcgctgcagaatcacccctttcctgtgcagaaaccctggtgtttctccttctccttctacctcccagcagtcctgggcaaagtctttcctgttcctccctccccatgagaaaaagtggttttgggttgtgacaaagacagaaaatgaggtttcaacataggaaaccttatgttgatttgaggattatgaaatgggttttgaggattccttaaaaaattgtctctgctcaaaacacataggagtaagataaaccttggctactgacactggagatttccctgccctcctgcatttgccatcccatgagaatggtgggggctcttgagaagggctgcattttctgaactgtgaggccctcttcattctctcctaactctaagctgcaaacagaaatttccctcacacgttttctagattgtaaaagaaagttcttctttactatgattgtggacattcctttataatgccaatttcaactttacattacttcaggatttttcactactcctaaagagtgtctcaaatgtggctagagcaagcaggttagtacactagatgtaagctacctggcctggaatctaaggatccatttgtctctgttctgcgtaagatgagccgggtgctggccaaaggctgtagcacactcacagagcactgatgacgcctcctggtaaggacccacactggggtatctaaaagcagacaggcatgtccagtcttctgttgccctgtttcctttctgattacatgtccttaacacacaaatttacatttttcttcttatttatatgagaagtttctatacaatacctgcaatccattctgagtggttataatttctgtgtgatattcatatttacatactgattccttctaaatacctatcatggtatcattgacaagtgaggcgaatgatccctgtattttgagtgcccaaggcacttgaggttttttggagttctgccatatgccaaattccactttgtcattttcccattttttttttttttttacgtgtagggatcctgacttttaagatgaaaatagtgcagaattcctccctgtgcttccagatcattttctccctcctactttaaagcccagctgctttgtacatattactttataatattaccccttctcattgtacctaccttattaccttcagaaattttcttttttttaatccttctgcctgctactaatccagtcatcattcttaatactattcatcacatagacaatttattcactcgcgaggcttctaagtttctcgacttcctatatcctgagtctttttcccctctaatcattttcagacttgtttccatgattatagaccattaaggaacaacaaagatctttcaatatttctatttaaattgtcctgtcgttctaccactacctcccttctgtctatatcagtaactcctacaattcttctatttctctgacctctccagttcatagagcccataacttttatttttttaatttttttttggtctttctaggatgttatttattaaaaatagattctctgtccctaccctcacccctgctggcaaaatggcctttcccaacatcttttcctgcatggataacaggtcttgaggacgcagatgtgcatcctacctaaactacaggctcaggcttttctgggacagtgaggcagcagctctgccagagccaagggtggaacagcacaagacgacatcagcaaaccctggtgcacctaactgtgggctgctatggagtctgggatggactggagttcctcctgctccaggcctcgggagacaaaatccacaaagagagacccagtggcccagcagcagccccctgagagcccacaactttttaactcttacgctttaattcttacattcttttaattatattttaagatttaagactataatatcaaccccgattaaagccaactccccgtaggttcctatgaatggcagagttgggaggggcactaaaaaatccccgtgggaactcattcgatttatcttctgtagttgtcatagactcctcttaggttcctctacttctaatcttggcctccctcattctagccaccaacccagggtctactctcaatacagaagtcagagtgatcctttaggttagatgttgtcactcgtccactaaaccatacagtagattcccgtttcactcagagaaaagcctacagcctgcataggcctacgaggtcctcggtgatccccctccctgttgtatttcttgcctcctgtctgttcctctttcccttgcttattttttcacaacacagtggctttctggccattcctcgaatacacaaggcacacttctgccttagaacctttgctcaagctattccctttgcttggaacatccttctcccaagtatcccagtcaggcctgcaagaagcctgaattattctaccagtgacacaatcattttcctaaaaccacttttcaatttttatacattcaacaattctccattgttcaccagataaaaatgtcacctcgggagggcatttgaattttaaaacatttggaccatatcttatcttatttttgactactgagtaagataaatgttactttatcaagtgcacttcatacccttacaaaacagtcttacacaatttaatgcctgttcatacatttgttcttgcaatttctgctaccttcttcatattgttcaatacttctagtcactcaagacactactgaatgcttctttctctatgaagcaggaaatggttctatatactctattttcacagtggagtaaaatagatacacattttaggaacaaaacaaccatgcagattatagaaattaaactattttttacatactttcgaaggtgaggaagttcagaagctcaaatatggttaagatatgttttgcttctatttaagtccacattccccaccactttaaatcttccaagaaagatttccctcattcaaattaaaaacattttgatacaagactgggggcagggaagtgctgggtagagaagggcggggtccctggtgagggctccaccctcgggcctgtgcccacagacctaaatgaggacaggcgtttctgtttttgcactcaaaaagttgccttttggcccgccacgcctcccatcctgtgcccatataaacccgagaccttaagcggacacggacacaagaggctggacatctagaagagcagaagaatacagcagcagacaccggcagatcagcgatggcggaaggacacgaatgcgaggggagttcagccaggggaagtctgcgagagtcctgccactgggcagccaactgcaggggaaaaccaccgttccactccatccctcgacttctggctccccatctatctcactgagagccacttacaccacttaataaaagcttgcactcaacctttcagcccacatatgatctgattcttccagtacactggtcaagagctcaggctgtcacattggccccctgtccttgcaataagcagagggtctattgagttgactaatgcaacgagacggcagacggcatagctgaaagagtgcactgtaagtcctagacgctgccatcccttggagcccaaaagcactccccatggcctctgcacctgcccgtctgcatgctcccctaggggtttgagcactggggcaccagtgaagtgagccatccccctgtcacatgtcctgcgaggagaataagggaattctccggttttaacttaatctgtaaaagaccttgttaagaggatgaaaaagaagccacagcaatggataaaacatttgtaaactacatatccaacaaaggaatattatgactgtttcgagatttgcagaactgtctatttaacccatagactcatgagcaataataaattattattgctttaaccagtgagatttgagtgaggcttgttatacagcattactgtgcaggtgtcaattgatatactctatattgcaatatcgattcttaaattgtctaaccataatcctatagaccattactaattccaagcttgttctttttatgaagagtgtcgctcaactctgatgtctttgttctgtttaatattttgatttacacatgaacacagttcccagcagctttcaaacctccagaagcccttaacatttctgattctgaaaaatatcttttcttgttttcagcattttttattgttattttttattcttttgtatgggaaggtactcagtttaccatcctgaattagtaattctttaaacatttttgcaattccagtaattagagatattactgcattaggcattgaagataccatggtctttgcatttcctgcttgcatatcgagtcctatgaactatttctggtgtctctgagtcacttcccagtgtggtcattggcttttactgagtctgattcaccgacctttactgagcctcactcaccaacctttggtcattcttggacatagaagcacaaattcaacagtgttgtttcccaaaatatgtaatatgcagggaaaattacttttcatgtaaaatagacgtgtccttttagtattaccagtagattattctaattatagactagtaacatccaacagacttatttgggtttagtgacagacctattactgtgttcgctcctcagttcaaatacagagtgtgtattttgcatcgtgtggctgcaagttttggggttctccatcatatacttagctatacaatgccagctactcttgtctggatattttcccaaatcctggatgattacaaacttctccttcactggtgaaattttttttttttttttttttttgagatggagttttgctcttgttgtccaggctggagtgcaatggcacaatcttggctcactgcaacctctgcctcccaagttcaagtgattctcctgcctcagccttctgagtagctgggattacaggaatgtgccaccatgcccggctaatttttttttttttttttagtagagacagggtttctccatgtttgtcaggctggtctccaactcccgacctcaggtgatccacctgctttggcatcccaaagtgctgggattacaggcatgagccacagtgcctggccaatttttttttttttaatgaagggtcaaacctgatattaagtctttcagacagtaagaagataactattcagggtctacaagatggccaattagaagcagctgtggtccatggcactcagggagaggaatgaaacggggtgagtgaatttagcactgtcaattgagatattcaggttctcacactgggactgtctaggcaaacaactcaacccacagagaacaaagaaaagcagggggtgtggggcatgatggcccaccaggagcagcacagagccaaaggaacccccacccccagccaaaggaagcagtgagtgattgtgtgaccctgcccaggaaacgactcttctcccacagatctttgcaacacatggatcaggagatcccctcacaagcccacaacaacagggccttggatccagtacacagagctgcatggagtcttagcagagcagctgctcaggcacacacagagacccaggagttttacacattccagcctcaggatccccagcaaggcaggaaatctgtccacatataaccctaggaagggagctgaatccagggagccaagcagcatcattctgcaggccccacttccatagcacctcacaagttaagacgcactggcttggaattccagatagccaatagcaacagcctagaatctgcctgagataagtatgaattcctggggaaagggggtggccaccatctctgcagtccagtagacttagctgtttaagcctgccagctttggagaatacaaatggtctggatgaggaaaggttccccataatcagcacagctgccttgccagatcatggccagactgcttctttaagcaggaccttgatccatcccttctcagtgggcaggacctccctgtggaggcttcagccattctagccagtgttctacattgagagctctgatctctccctaggatggagctcctggcagggaggggcagcctccatctctgcagttcagtcaactcagtccttctagcctgttggctttgcagaatcccaaaatggtctggacgagaaagcctcctcataatgcagcacatttgctctaccaaaaagcagacagactgcttctttaatcaggcccctgatcctgttcatcccaactggatgagacctcccaacagggtctccagccacctcctacaggtgtgttctggccagcaacaggtcagtaccccccagggatggagcttccagaggaagaagctggctgccatctttgctgtttcacagccttcactgatgatacctccagtatgggaaaaaccgaggcaactaaggtctggagcggacttccagcaaaccacagcagccctacaataaagtggcctgactagtaaaggaaaaacaaaaaacagaaaacaacaagaacagtatcaatgaaaaggaccccacaaaatccaaggtcaaaggtcagcaagctcaaagattgaaggtagataagcccacaaaaatgagaaagaatcaacacaaaaatgttgaaaacttaaaaagcaagagtgccttttctcctccaaatgactgtaacacctctccagcaatggcacagaattgagctgaggctgaaatggctgaattgacagaagtagggttcagaaggtggtaataatgaactttgctgagctaaagaagcatgttgtaatccaatgcaaagaagctaagaatcatgataaaacaatacaggagctgacagccagaataaccagtttacagaggaacatgatcaacctaatggagctgaaaaatacaacacaagaccttcacaatgcaattacaagtatcagtgggagaacagaccaagtggaagaaggaatctcagagtctgaacactatctctcttaaataagaggggcagacaagaatagagggaaaagaatgaacaacaccccccagaaatttgggattatgtaaagagactgaacccatgactgactggggtacctaaaagagataaggataatggagtcaaattggaaaacatacttcaggatatgatccagaagatctttcccaacctagcaagacacaccaacattcaaattcaggaaatgcagagaaccccagtaagatactccatgagaagataaaccccaagacacataatcatcggattctccaaagttgaaatgaaaaaaaaatgttaagggcagccagagagaatggccaggccacctacaaacggaagcccatcagactaacagcagacctgtccgtggaaaccttataaagtacagtggttggaagctattctttaacattcttaaagaaaagaatctccaacccagaatttcatatctgaccaaactagcttcgtaagtgaagaagaaatacgatccttttcagacagcaaacacttaggaatttgtaccacaggactgccttgcaagagctcctctaggaagcactaaatatggaaagaagaaaaccattaccagccctacaaagcacactgaaatacacagaccagcaacactatgaagcaaccacataaacaagtctgtgaaataaccaggtagcatagtaatgacaggatccaacttacccataacaatactaacttttaagtgtaaacagggtaaatgccacaattaaaagatatagaattgcaagctgagtaaagaaccaagactcactgatatgctgtctttaggagacacatctcacatgcaaagacaaacataggctcaaaataaacggatggaagaaattttaccaaccaaatggaaaacagaaaaaagcaggggttgcaatcttagtttctgacaaaacagactttaaaccaacaaagaacaaaaaagacaaagaagggcattatataacggtaaagggttccattcaacaggaagagctagctatcctaaatatatatgcacccaatacaggagcacccagattcataaagcaagttcttagagacctacaaagagagacctggactcccacacaaaaatagtgggagactttaacaccccactgacagtattagaaacatcactgagaccaaaaactaacaaatatattcaggacccaaattcagctctggattaagtggaactgatagatatccatagaattcttcacctgaaaacatcagaatatacactcttctcatcatcatatggctgttgctcaaatcgatcacatatttggaagtaaaacattcctcagcaaatgcaaaacaactgaaatcatgacagtctctcagatcacagttcaatcaaattagaactcaagatcaagaaattcacttaaaccacacaactacatggaaattgaacaacctgctcctgaatgactcttggataaataacaaaattaaggcagaaatcaagaagttatttgaaactaatgagaacaaagagacaatgtaccagaatctctgggacagataaatcagtgttaagagggaaatgtattgcactaaaggcccactacaaacctctgctcaaagaaatgagagaagatacaaacaaatgaagaaacattccatgctcatgggtaggaagaatcaatattgtgaaaatagccatactgtacaaagtaacttatagattcaatgctattcccattaaactaccattgacgttcttcacagaattaggaaaaaaaactattttaaaattcatatggaaccaaaaaagagcctgaatagaaatagacaagacaatcataagcaaaaggaacaaagctagaggaatcatgctaccagacttcaaactatactttaaggctacaataaccaaaacagaatggtgctggtacaagagcagacacatagaccaatggaacagaatagagaactcagaaataatacgacacacctacaaccatctgatcttcaacaaacctgacaaaacaagcaatggggaaaggacttcctatttactaaatggtgttgggagagttggctagccaaatgcagaaaattgaaactggactccttccttacaccatatacaaaaattaactcaagatggattaaagacttacatgtaaaacccgaaactatgaacaccctagaagaaaacgtaggcaatctcatttaggacataggcacaggcaaagatttcatgacgaacatgccaaaagcaattgcaacaaaagcaaaaattgacaaatgcaatctaattaaactaaagagattctgcacagcaaaataaactatcatcagagtaaacagacaccctgtagaataggagaaattttttttgcaatctatctatctgaaaaaggtctaatatccagagtctgcaaggaacttaaacttacaacaaaaaaacaaccagacaaccccattaaaaagtaggcaaaggacgtgaacagacacttatcaaaagaagacatacatgtggccaagaaacatttaaaaaatagctcaacatcactgatcattagagaaatgtaaatcaaaccacaatgagattccatctcatgacagccagaatggctattataagagtcaaaaaacaatggatgctggtaaggttgcagagaaaaaggaacacttttacactgttgtgggagtgtaaatgagttaaaccactgtggaagacagtgtggtgattcctcaaaggcctagaggcagaaataccacttgacctagcaattctattatggggtacatacccaaaggaatataaatcattctattataaagatacatgcatgtgtatgttcattgcagcactgttcaccatagcaaagacatggaatcaacctaaatgcccatcagtgatagactggataaagaaaatgtggtgcatacaacatggaattatatgttggcataaaaagaaatgagatcaggctgggcacggtggctcatgcctgtaatcccagcactttgggaggccgaggtaggcagatcacgaggtcaggagattgagaccatcctagctaacacagtgaaaccccatctctactaaaaagacaaaaaattagctgagcgtggtggcgggcacctgtagtcccagctactcgggaggctgaggcaggagaatggcatgaacccgggaggcgaagcttgcagtgagctgagatcgtgccactgcactccagcctggatgacagagcaagactccatctcaaaaaataaataaataaataaataaataaataaataaatagaaatgagatcatgtcctttgcagggaaatggatagagttggaagccattacactcagcaaactaatgggaacagaaacccaaacactgcatgttctcacttataagagggagctgaatggtaagaacacatggacacatcacagggaacaagacacactagggcctgtcagaagacggttagtgggagggagagcatgaggcaagaaaaggtaatgaatgctggcttgatacctgggtgatgggatgatctgtgcagcaaaccaccatagcacatgtttacctatgtaacaaacctgcacttcctgcacaggtgccctggaacttaaaataaaagtcgaagagctccctctccctctccctctccctctccctccccctccccctccccctccccctgcctctgcctctgcctctgcctctctgtctcccctttccacggtctccctctgatgcggagctgaggctggactgtactgccgccatctcggctcactgcaacctccctgcctgattctcctgcctcagcctgccgagtgcctgggattgcaggtgcgcgccaccacgcctgactggtttttgtattttttggtggagacggggtttcgctgtgttggccgggctggtctccagctcctgaccgcgagtgatctgcctgcctcggcctcccgaggtgccgggattgcagacggagtcttgctcactcagtgctcaatcttgcccaggctggagtgcagtggtgtgatctcggctagctacaacctccaacctcccagccgcctaccttggcctcccaaagtgccgagattgcagcctctgcccggccgccaccccgtctgggaagtgaggagcgtctctgcctggccgcccatcctctgggatgtgagaagcccctctgcccggccgcccagtctgggaagtgaggagtgcctcttcccggccgtcatcccgtctaggaagtgaggagcgtctctgcccggccgcccatcgtctgagatgtggggagcgcctctgccccgccgccccgtctgggatgtggggagcgcctctgcccggccacgaccccgtctgggaagtgaggagccctctgcccagccgccaccccgtctggaggtgtacccaacagctgattgagaacgggccatgatgacgatggaggttttgtcgaatagaaaagggggaaatgtagggaaaagaaagagagatcagattgttactgtgtctgtgtggaaagaagtagacatgggagactccattttgttctgcactaagaaaaattcttctgccttgggatgctgttaatctataaccttacccccaaccccctgctctctgaaacatgtcttgtgtccactaagggttaaatggattaagggcggtgcaaaatgtgctttgttaaactgatgcttgaaggcagcatgctccttaagagtcatcaccaactccctaatctcaagtacccagggacacaaaaaccgcggaaggccgcagggtcctctgcctaggaaaccagagacccttgttcacatgtttatctgctgaccttccctccactattgtcctatgaccctgccaaatccccctctccgagaaacacccaagaatgatcaataaatactataaaaaaaataaaaaataaaaaaaataaagttgaatcaaagaaaaaaaaagtcgaagaaaaaaaaagaagataaccatttgaattgcctcatcaggtggcttgttatgggagaatgtatatttccaagactcttgaaattaaagagagtgagctatcataaacagtgagctcctagacagaaataatttagagtatgtgatagtaagcacacctgtcaaggctctctcctttgaagaaaatgtaatgaggaggactctgaaagaaattagagcatgtacacacaaagattcaaaatcaatcaacattattattacaaaagctgagagcagaattaaaagaatgcctgtgcttggaatacttgttatggagaattttaatttgctaagaaaatggatgagacactacagtattttgaagtgatacttccttctgatcatcagaacaggagcaaaggaagaatatttaaaattgaaagcttttatataattcttactgtgttttgggcatttcaagtgggttcattttccaagtagaaaatattcagcatctacttagaatgccttattttatggaagagtaaactgaagtagagagaagatacataattttcttcatgtcacatggctagtaaatggaggaaagagggattcaaacacaagaatttggggactggattccttttaaccatttataaactattataaccaaaattaaaaatataggttcattaaaatggaagaggaacaagacttccttaggaatagttctaacttcttagaagacatatttctcatatgaaagaaagaggaggttctcggccgggtgtggtggctcacacctgtaatctcagcactctgggaatttgaggcaggcggatcacttgagctcaggagtttgagacaagcctcggcaacatagtgagatcccatcactactaaaaataaaaaaaaattatctggggattggtggtgcatgcctgtggtcccagctactcgggaggctgaggtgggaaaatcacttgagcctagggggtaggggttgcagtgagccaagagcatgctactgtattccagcctaggtgacagagtgagacctcacccccaattaaaaaaaaaaagaaagaaaagaaaagaaagaaagaagaggctctcatatccaggaaagatcaattttagagggaagaggaaatgcactcagggtcaactgctctcaaggagttattagaagagatttattttggttgttactaaggcaggcaagataactggatgtaaagaatcttcatggaggaaaaacaaagatacaggatctcagaggggagactagataaactttacagaggaagacaggatttggggatttgttaaggaatgacttaaaatcaacactatataaagggttatatgcaatttggacatttttgagaagagatgccctgagacatcaattgaagactctcaaattatttgatgttcagctctagcctgtgcttgaaaggagcctgcttaattatttttaaaattatgagtcttaagaaagtgtaagaaagatggaacatattaaaggaaaagcaggcaaacaaaaaatgagaataccttttagatacaattgctcaaccaaggaaattaaagatattcaatatttatcttaatagtgcttgctttagaggatccagacattgttaattgcacatctctcaatagagaagaccacagagatcaaatctagaatattttgaaaagactagtgacaagtacaaacataaaatttaagaaggaatttaattctagtgaatattgctaatactacatgtgcttgagaaagaacaggacaaatttacaaagcctttcaaacttctagaaattcagcttaagctagaccaggcccagtggctcacgcttgtaatcccagcactttgggaggccgaggcgggtggattacctgaggtcaggagtgagagaccagcctggctaacatagtgaaacctcgtctctatgaaaaatacagaaattagcttggcatggtggcacaagcctgtaatcccagctacatgggaggctgaggcaggggaatcacttgaacccaggaggtataagttgcattgagccgagaccacgccactgcactccagcctaggcaacaaaagcaaaattccatctcaaaaagaaaaaaaaaaaaagtagtgagccaactctttattcagtaggggatcctgtccgctaaggaaaaggtaatggaagggcatattcgattcaggagaatgctagctagcccaataagctgcaaagctcagccccttctttaccagaatcaaagctcacatttccacttcagttgatctgacatgagtatttttctctcaggtgttttgaatcttaggtcagaaagagtggttacccctgcgcatgaccactgtgccaatgtaacacagcatatattactttgggtcttgacaaagggctcatttttagtgactgagtccttctggccaccaggagacacttcagtgccacaaccactcactgacactttagagttgctaagaggactgtcaggccatgggaaactaagaagaagctcaggcttggtacctgaatcatgagtcctacctgttgagcactgaaaaagcactggaaagagaagggaggacccaaaaacttctaaacctgtgcgaatgggctaagaccaatagtgaggttgggattttaggcaagtttgggatggttgtcagacaaagaagccactgatataccactagtacaatgcagttcgaattacaataaaaagttatagggggtttttttgggtcagaaagagaagaagtaaaagagcacacatgattcctatctccttttatcctccaaactaactctcactaacccacagaaatgttttcataggtggcacaaaggtaggctgcaacaattgtggccaatattatggtagagaaggaccctgccctgtaatgctcaacatattaatgttacgtgagagtgggacagggtcatctctgtgacagtatagtcacagaagcctcttcctgctcaaataagtggccttcattaaaagaaacacagaagaatcttgtttcataagctaatgccaatcactgagacagcaacggtttcaggaacatgagggaagctgttggaatgggctttcctttaaacctagcctggttccatcatgctgagtggtgggggctttaagtcagggcctgagaaggacagcctaactgtggtataagtcagagggctcctcattcctcataagccgacaaatacattaatatcatcagaaaaattaccagggcctgtggtgtcccaaattctgatttcattttccattgaagatcagagcacagaggaaggagatacctcactcatgtgctcttcttgttatatgctcacagtttctttgtttcaatgactctgtaccctggaagaggttagacctggatatgctaaaaaaaaatttttttaatccctatcctagaatattgtggccttgaatcaaagtgttttctatgtttgtgttttcatcttccttcctaagccctatatctaggttttgccttctccatccacaaatctcaggatgctatggagtctgaagacacctgattgcagaaagcacaagaccccccaccagcgcgcgcacatacacaaacaaatacaggaccagaaaggagtggttactgctgattctctaacattacaaaaatatcacggttgtaacttctcaccctgccagtcatatgtttctctgtcacttgacatactcccctctttggggtgttggaggaaaaaatctctgtgccaacagcagagacatggaactagtgtgtcacatccactctatgaacagaattcttactactatttataccctaaaaagcaggccattttctagagtttcaccccctcaccagaaagaatttatttgtgagtattggttgacttactataacaagagactcaagtgttaatcattaaaggaacctgttagtgctttcttagaagtaagaggaagatcacatttaactggagagtgccttattgtggttttcaaggaaggtcaaagctcttacttatcactgctcaatcttcacccgatgcccaaagaattaacataattttgaaccttaccctggagaagcgaaatgggaccttgtcctccagaaatgcagaagacactgtgctgtgggctgggggagtcacggagcacgagagtatccatctccagccctcactggaaataaaatctgcacagttctatctctttccagggcagccaccttgttctctgcatgaggagcatggaggtccagatgcttccaggagggatctggggcaaagctctaactaagcaacacattattttgattttgtgtgtctgggatataaggatggccggtaaggggaacaataaagttcttgagatttcacaagtaatttattgatgtccagaatttgaggtgctgatggtacacctaagtggcaatatgcaccaggcagatcaatatgtgactcgtcagagaaagcagaatgggtgatgtgatgtgcaatgccacagaagcactgcagccaggagaggtgacagctaatggggatgtttggagtctttgagtgaaccaaacacatcccagagtaattgtaatttatttcagtcaatcttctgtacagacttagcattcacctttggaggaaggtcctttgagcagggacagagatggtgatgtcactgacagtcccccttttactctgggtgagaggtctagaatcctcagctcctgtattcgtgcccacaagggcctcatctaggtgaaggctccacctgccccaccctgccatggccaccaggctcctctgctgtgtggttctttgtctcctgggagaaggtgagtccccacaaataaagcacctgcatttttggatattgccagttatgattccaattatgtttcttattctgtccccaaattctatctcttttcacagagcttatagatgctagagtcacccagacaccaaggcacaaggtgacagagatgggacaagaagtaacaatgagatgtcagccaattttaggccacaatactgttttctggtacagacagaccatgatgcaaggactggagttgctggcttacttccgcaaccgggctcctctagatgattcggggatgccgaaggatcgattctcagcagagatgcctgatgcaactttagccactctgaagatccagccctcagaacccagggactcagctgtgtatttttgtgctagtggtttggtcacagcgctgcagaatcacctgctccctgtgcagaaaccctggtgcttcctcttctcctccagtacccagcagctctcagcagcctttcttgctcctcccctagcacaggaagtacataggtttcgtgttccacatgtcctaggcaaggcaagaacaggtcataaggacacatcacgttaggaaacttttggtaggaagtcagtgggtgtgatggttcctgggattccacacatacttctcacaagggtgcctgagtccaagtttgagggcgagtgtcacagactggagctttcaagtgattgagtgagcttaaaactgtgcagccattgcacatggatgcttatctcctttgctgctttccgttatggcttctttgccatttcttttctcttctaccttaaaactttcaacatctttgatgacttccaacatcaatattggcttcccagttttttcacttgctcacttcaaatgatcatttccttcaccttgtgtcagatattcatttccactttctttttctagattccaatgacaaattatttgaattacccccaaatagtttcctcaagcatcccattgtctcatgcgggcttctcttttcatctctggtactacttctgcagcaattcttcaacccatcaggaccactaattgacttctcctgcaaatattgcaccatatatcatctcctcatgtactatattccttatctgacttagactatgtgttccaaggtgattgtgaaattttgcctatgtcttcagctcttttctttttctgtttcttacctggaaaataaaatggggcctactctgtgcccctttcaatgacacagagaacataaaatgtcccttacccttgtcaagcagtattataacgatacagtgtgtcttgaggtctgtaagtccctctatgcatataaaattatatacttttcttctattaaaataatttgttaccttttaatgagttcatcagtttcatctttcaattatagttatacttttgacaattatagaagtactaaaaaaagttatgcacccagaatgtatgattctatcacttttatgtgtgtgcgcacttcacttcatacgtacaaaaaagttaaaagaatgccgaataggcatatttatccattctcttgtaggaatgataaagatgaacttccaaggggaaaatattttcaaaataatccatggcacataaaattatttaagaaaaaataaatcaataaatatccctgttaagtttatatatagttttatatgcttgggtaaggaagaaaaaaagttgtgatatattttgctggttatttggagagataaaatatagaaagagcagaaagaacatgattagctttgtctttgtttaaaatttttgctttttaaatttgatacactatttaccatcaaaatttaaaacaacaccactgctataaaacaatatacagacaaactaaaaagaaaaaggaatttactatgtaaaaaaaaaaaaaaaagcgagagcttataggcagagtattaaggggaatttaaaattataaagacctgtaagttttcagagaggtataggcctcacagctggagctgggattttaatgtccatatgaaagagatgacagaaaacagccagaattacattgcttgccttaatcctggagcttcaaaatgctcccaggctttataaagtaaaagtattacaccccaaagacccagaaacataattggaaactggatgtttggtcaggcctttgggtgatagataaaaaggaaaagttaggagagaaaaattgaatcttcagactgtgtctcacatgtgtttggaatgaaatatactctgcatggaatgtacaccatatacccaaaaactgacaaaaaggtccataaccattaaaacccttggagaccctggcattaagagattcaatacggttctggagtaaacttctgcttccaaccaagatagattaacgggaattagatttaacttcttgcttgaaacagctaacaccccaacccccaccctgtccccctgcacacacacattcacacaacatgtggaataacggttgtcaagacattggaagtaggcaacagaagacagtgatctctgagagatggaaacaaccaagctgagaactatgactgtcttaatacctggagggagtttccaggccctgggccagaaagaggaatccaagcagagctgggtgatctcactgagctgagtcagagttggaaatacaagatcaaagcagctagatttcacatgacaggccattgaaaaggcgattgctgcacagagagaatcctggagaccttcctagggtctcccttaacccttcagctgtgctgtaagcagtacatgtgtgaggaaactccctaaggttggagaaagagccactcagcaagattagaggaaacaatgcctggagctcacaaagggctgagagtaatatatacatatattactctcatatatatatgtatatgtatatttttgcattgagaatgggaaacttaataattcatgggtcaatcagtagaggtttcagatgacttatgcctcagtataaaagcaaaataagcccttcactaaataagccacatttggctcctggcctatgtgggtgagacttcaaaatatcaaactgtttccgagtaacttaagtctcagagcaaaactaaagaatatttctaatgtacaagaatacctgttcggagatatcagtatgaatttattgtttttaaacgtatagatacaatggtaaagaaatgaatacatacctgtgtgaataatgggttggtatatatacatgtatttcatacttctgtccacttagaagaccactagtgcacagatgtttgttgccaaatattattctccaattaaaaaaaaatgaaaggtggttctaggaccctgaggtaaaaaatacaagaatgttgtaatgaggttttccaaaaaaaaaaaaaaaaaaaaaggatgggacatatctcaaaaggacagaggaatcaatctgaaagagcttccccaatgactaaggctggaacaatttgtaaaagaaaattcacaagttcacactgagaatgaaacgattaaataaataaataaataataaaaaatgtgagaaaggacaatctcttactgaagaattccaaattgcatatgtagaagaaacagagggaaatagaaaagtcactgtgacaacaccactgtgagtaactgccacacataaaacccaatagtgagtgctaaaattagtgggtgtagctaattttaattactaattaataactaataactttaataactaattaagaagaaatggatcatttgtacagtcacaaagtgtcatccccaaaatattaattaatatggtggttttaacatatgcccacacattcttttatactcatccctctagattcccctctcctggattcagtggcctgcctctaatgaacagacatgggaaatagaaaaatggtaaccgagtgatccaaagtaaataaactgacccataataagtcttgttaacctcatgtgcattctcttatgatgcaatgttgtgatgttatcatgtgactacatatctgtaatattcctcccccaaatctataattcctgtctaataatgagaaagcatcaaacaaatcccaaactgaaagagattctacaaaacacctgaccagtaatcttcaaatgtcaatatcgttaaaaacaaggaaagagctgtcacaaattgaaggacactaagaagatatgacacttaaatgcagtatgggatcctggattaggtgctagggcaggaaaaggtcattattagaaaaactggggaaatctgagtacagtctagcttagttgtgccaatgtcaaattcttagtttgtgtgatgttagcactagtgggtgttggatgaaggatataaagtcacttggtagtattgttatagctacaggacatcaattctccagctttgggtcacctgagtccctatcaagccaatttgtgaagctgctgttagttgtccttactccccagtcttggagctctcagttagacctagaatcaacctcttcttcctcttgacctctgcttcactgcatcctaaacgtggtgaggtggaggggtggtgagggaggctgagcagaagcccatcattcagaagcccatcactagagcttctctgatgattctctgagacaggggctccctctgtagtctcctttgtgcacaatcccaagcacgctgggccacacagactccaccaaagctagttttgtgaggaggcaaatattgaggctccattgtgaagagaatgtccatgtcagatttaagtacaaaagattaaagttgatgcattactattgcaggaaaatgatacctgtgagaatttccaaaagccagattttgtattgtgtggctggctgagtaatacccctccccacaaagacattcacatcctaatccctgggatctgcctctgttaccttagatggtgagagtagactttacagatgtgatgaagttaaggatctggagataaggagattattttggattagtctggtggccctcaatgcaattacatgtgtccttataagagatagccagggggagatcagacacaaatggagaagagaaggcaatgtgaccacaggagaagagattagagtgaggtgaccacaagccaaggagtgaggcagccactagaaacagaggcaaggaacgaatcctctcctatagcctccagggggaatacggtcctgatgacacctggattttggtccattgatactgattttggacttttccagaactgtgagaataaatctctgtcattgtaaaccagcaactttgtggtaatttttatagcagccactcaaaattaacacactccaatatgtccagttaacctgagactaggccaagaaactcatgttcttataatattttctgcaaaccttgctgtcatgtttttatctgacacccatctcaaactataatgaaagaaaataattttgagacttcaatgtccccctgtctggggtgtgccttccatagttcattggaaaagtctagtctcctttcaagattttattccagcagtacctcctcttgaaagaattttaggcattgttttctgttctcagtgcacatactaaaaagaaaaagacaaagactcatgtctacttgatgtttacatttttgcggggagggagagacagagataaacaaataagtaaggcatatagtgtattagcaggtgatacctgcaatgcagaaaaagaaaaggcagactaaggtgagggagaccaggactgtcagagtaaggagcgttgaaatgacaatacattgttcagagtagggcccaatgaggaagtgacctttgagcaatgatttcaaggagatgaaggaaagagacatgtaggtatctgggggaaaagaattccaggcagagggaggagccagtacaaataccctaaaaaaatattttaggaccaatgaggaggcccatatgactgaaaaattaaggaagggagtggtagactttatttccaagcggtaatggggcaggatggatcatttaagaccttgatggccttaagtgctttgttgttttgttttcttattccaaataaaactgggagctagtagatgatttggagatgagtgacatgatctagcatgttctagagggctgagtttgagagctagttcagaagtaggtgaaagcagggagatcagttaggaatctattgcagtaatccaggaaaaagatgatggtggccttgtcctgagggttagcaaagaaggtgatgaaaaaatggatggattctgagtgtattttcatgatagagccagttgaatttcctaatggattggctatagggtgggatagaaaaagaggatttgggaaccactctaaggttttcagctggaaggctgttggtggagtaaagttgaggataatctttcatgtttagagcatgctgtttgagagtggtggggggaaaatgttgattggagtgcattagagagataatgggaaaagagaatttggaggtaagtattgatcattagcaatagcaacaatagctaccgtagattaaaatgccccacagtctatggggatgtgatacatgagggaagacagggccagatgggatgaggtaggatccagacatcagactcaggagctacgagtggtatatataaggttaacacctagtcaaatgcataaacaggttgattttaattgatgtcagtttttctccattgccccctctagaggcaatcttcttcagagaaccctggctaggtcttctatgtttcatgtccgtagagggagctcctgagactgtggacattggctaatatgctgatgtcactggaggccacatcttacagggccaagagacagatttgctttcctttttctcatacttgtaagctccttcatctggaaatgtgatttacctgggtcctgccatggtttccaggcttctcagtttagtgtccctttgtctcctgggagcaagtgagtcttcaggtacttaaatatctgtgctgtaccctatcccagtctattcatgtcatgtattctgtttttgtctcttcccacagagcacatagaagctggagttactcagttccccagccacagcgtaatagagaagggccagactgtgactctgagatgtgacccaatttctggacatgataatctttattggtatcgacgtgttatgggaaaagaaataaaatttctgttacattttgtgaaagagtctaaacaggatgagtccggtatgcccaacaatcgattcttagctgaaaggactggagggacgtattctactctgaaggtgcagcctgcagaactggaggattctggagtttatttctgtgccagcagccaagacacagtgcttcacagtcgtgcccttgctgtgcaaaaccatagccttctcctctcaactcacagctgcccaaaaggaaggctttccctgtgccttctcccccaaggaggggagataaagaaccagaattaactcatgaaatacaagagtattccaagaagatttgggtgaaaatacttgtggtttgggggatctctgaagttttttaaacagaactcaaactatgtgtttctcatatttatttttattttttaaagtgtatgttgcctggttataaagcagacttcttgcctatcttgctgctctgaaaggtttgtgactctgactgtgaggccacatctttatatcccttcttatagtaagagaaacaagtctttctgatgaaaataaaaatagtgaataaaaatgcatttactactggcttttaggatgctcaatgatgatgctagcaatggtggtagtggtgacgttggtaatggtggtgatgagtttaggttgcttttgtctagcatttataaatttccaaccactttaaaacaatctcattttagagtggaatagctaagtccattatcagaggttaatgctaattttctgttcacatagggtctgagtttttaatgtaaaaaatatagttagcactataaatagatatctgtcagccgatacagaacattttttaagatcacttccagttgctgcaataggaatatgtattcctattttttttcttttttctttttctttttttgagacgaagtcttgctctgtcgcccaggctggagtgcagtggcaaaatctcagctcactgcaacttctgcctcctgggtttaagcgattctcctgcctcagcctaccaagtagctgggattacaggtgcctgccaccatgcctggctatttgttgtatttttagtagagacgggatttcaccatgttggccaggctggtcttgaactcctgacctcaagtgatctgcctgcctcagcctcccaaagtgctgggtttacaggtgtgagctactgtgcccggcctttttttctttttgagacagggtttcattctgtcaccccggctggagtgccatggcagtgtgatcacggctcactacagcctcgacttcctgggctcaagcagtcctcctgcctcaggctccctagtagatgggactataggtgtgcatgaccacacccagctaatttttgcattttttgtagggacaggtctcactatgttgcccaggctggtcctaaacttcttggctcaagtgatcttcctgccttggcctcccaaaatgctgggattataggcataagacaccatgcctggcctggaatatgtaatttttaatgagacctaatggtataatacattctacctggttcaactgccttcttttaatatctggattccaatattctgctcatgtttcagccatgtttttgcaaacagtcctgaaattcactctaataataagtttcattttcccagtctgattgttatttagcacctcaaattattattgaactcatcctaatcctgattaggcaaatggatagtgagaaaatattacaagtgggcttggattttaattttttcaaacaatttaaaacccattttccttttctaatgatcaagatccaatttttagataatcagtactctctctttctatgtggacatgtaatatgaataggtatattgtttctgtcacaggcatcgcaaactcatatcttgcttgaaacttgtcgatgaactcctttagtatgacaagaacaaagagaaatagatttttaaagcatagccacatattggacatgagtttttcttcaaaatttcagctgcagaaccctaactggtgcctttccttttattgtgttatgtaatctaaggtcataataagtaactaaattattgatttatttttccactctgtaatctctccattatatttaaaaatagcagctatgaagcaaaacaagttcctcgttgggtacattgcctcaactccaaaatctaacaagcagaagtttaattcagtgctttgccatttcatactatagacaccgaatgtcctatcctataaggggcacacagtggttctctttatagttctgttagctcaagtggtatctttaggtacaatttttagaatttttttatttgttaatctttcttaaggtatgattgacagaaaaaaattgtaggtatttaaggtatacaaggcgatgttttgatatacatatacattgcaaaatgattaccacactcaagttaattaacatatccatcacctcacaaagttacctttgtatgtatatgtatggtgagaatgatctactctcagaaaatttcgagtgtacaataatcattaactatagtcaccatgctgtccattaggtctccagaactttcgagcacactccaaaacatcaacttttattctgattaagcctcaaatatgtcttcttgttgcaaatattagctatttttagattagctataaataatgaaaaatgctagcataaaagatggaaagaataaatgcagataagggctctaaggtctttacactttccaggaagtgataaaagctgcaatttaaattatacatgaagaagtcaaggatggcaactcctataaacagctgatacttcaaacctggaatgtctagtgctaagcagcccggacccctgcacccagcacacctctctttggcatgataggaggatgagggatccaggtcttctcctcccatgctgcccttggcctttatgttttgcctttcattagtaaggcttctcccttaattatcaccctatgacaggaaattcatcctaagcctggacacgtgagagatggtaactctgaagcagccccctgcggatgacaccaaatgaggccacacccagaacaaattgcaagaaataacaaggtatttcttacagaatccctaagagaacatgtctgtctgcatttaagtgtctacagtcataaatgcacagcatatgattggatcagatggaactgaaagactttcagtgcttcatggtgcccataactctcattgtcctgaagtggtgttggcagtggactcagcagggtgccgtgagatggtgaggctacacacatacgatcgtgaccaagctggctacacagatgggccaaactcaccctgtgatggtagacagagcttaccaatgggttccatgaatggacaatgggcatgctgctgtaataatcccttcgaccatgatggaagtcaggcaagacccaggccatgggaacattgaaaacagtcacctctagcctcaagtatttcctactgtttgccacactgtgcctacaaatatcatttatgatacagcttaaaattttcatgtttgtgaaaattattatcagccttatccaatctgatattttgaatgaaatcacattaaaaccatatattaatttaagaactggcatcttcataatagtgagtcttctacagtttcctagaccactaaaaaatcatggattgctatctcagacttgaaatgggtgatccttattcttctctcagtcagaacagtgaaaggtacagattcatggcagctagtccagcttctaaaagtcaacttctaattgtctactttaggacaaaaaagaaataatatccttaggaaggccaccatggaattcattctatctgaacaatccttacataatatcatttcttataatatgtcctcaacatcgtgctctgcatatatttctccaccatctctaaaaatcctcttagcccaggcctcctcaaactttaatgtgcatgtaaattatgaccttgttaaaatgcagattctaatccaatcagtcagggttggagctaaggttccctgtattttgaacaagagtccgtccaagtgatgccaaagctgccagtccatggaccacaatgagcagccaagctctagatgacacctacaataattacaggtgtaaggcccctcttctcaagtatcattttgcacagttcctggactaggtcagatacagaccctacttaccacatgtatctctgtattccaagtattacgtaatcatcagttttcctaaatctaggcaccaatattttaacatatattttcatggtataaatagaaattaattttctatagtaaatacactaatacctaatcacattcatgcatctttaatgtgagtagcaaaaagccaaggcactatcttaatggttattgagtgagactttagcaaatactatctttatggagaaacctctgggctgctttttaggatgtgagaaaagtgaggtaaagtgaggagaactggatgaacacgggacagagacagggacaggggcaaatatggggacacctgtctcaaggaagcagcaaatgatatagaaaataaatatctgttccatccctgttccagacaagcccatgtacctgccaagtaggaagctgtgtatcacattgcaacaaggaatgaccccggccctggtaaagtcaacagcaacagtcatcacaggccaatctgcctatcagggactggagactctctaaactcccacctctcaacccaggaatcagagcctgagacagacagatgcttcattcctgtatggggtggtattcctgccatgggtcctgggcttctccactggatggccctttgtctccttggaacaggtgagtactgggcagaaaggaaatctttgagcaaagctatcttgtcctcagtctgcacctttcattcacagcagtaacactgttctccttaactctgactccaaatttgtcttctttctctacaggtcatggggatgccatggtcatccagaacccaagataccaggttacccagtttggaaagccagtgaccctgagttgttctcagactttgaaccataacgtcatgtactggtaccagcagaagtcaagtcaggccccaaagctgctgttccactactatgacaaagattttaacaatgaagcagacacccctgataacttccaatccaggaggccgaacacttctttctgctttcttgacatccgctcaccaggcctgggggacacagccatgtacctgtgtgccaccagcagagacacagagctgcagtgcttcctgctctctgttcataaacctcattgtttcccagatccaggtgctttctctaggacttctccctcaccacctcttacaacaataggaagtgggttggtggctgtcaatatctgtagacagaagttgagcacaaaccaataaaaaccattgacagttatgccaagagtggaaaagtggttacacatgcctggcattcagttggtggtattttcccaggatcacatttagaacccatgctgtccttttcagaagacaaataagaactttttctttctttttttcattgttttaatctaagtcagaggcttagaaatataagaggtgatatgtgaagaattatggacacccaatgtctatgaagtccagtctctggcattcgatgaactcttataggatttaatcctcctggagaatccacatgtttttagcctagacctggagcaactacctcattaatgggagaatgaaagcacaagtatcccaagataaaaatttctcagaggtaaaaccacattggagagaaaaaaagagaagaccatacattaatctgctcatatctggagttggaggtactattgagatgagcaaatggaaaccataaatacataaagaaatgatattgaaaatagagtacatttggagatgaagatcatggagccatctgtatagaagagagtaataatgtcattaaggtgcataagagtgccagcaaatgtcaataagaaaaactacaggagggaagaagatgggagatcctgctccccttaacaaagataaataaaatgctgagtgagaaatattgcaacctcataaattgtcacatggaagtatgtatttataaattaccattataattaacatccctcaatgagaacgatattctgagaaaaaaaagcagaaaatatagttatatggctatctaaaaatgtaaaattttgcacattaaattaagataatctaggaaaaatatgacaagacctattacaaaagagcttttacaaattgtttgctttaatgatattaataacataatgatagctaacatttactaagcacatattacatgctagaccttaagtcttcttcacatatatttatagttcatgttagttttataacaacctcagaaagttaatactatagtaacctcactcatttatccatgaggaaactgaggcacagacaagtaactagccctttatcacgtatctcgtttgtggtggagccagtatcaaaatgtagacaatttactgctggagctcattctgtcttcggagtttacatggattctaagtcagaccttcagataggaaggtaaatggttataagccagaagatttccacactctcaccaacattgcactggcttttctttgggtcttggccagagggtgagcccttgtgactatgcttcactggttgactaggtttgagttgcaccgaggaccaacatagagaaagaaggtctttgggataaacctgggaggatgaagggtaaaaaatgcagaacttaaatcttgatcccaagggatcatttaaagatgaatgagtctcccttagaggatgagaaattaaacataaactctttaacttgcagagatgctgaagtgttttcctcaagtagtaaactttgaatcatggttatatgcatgggagggagcctatggggatggaacatggatgaaaaagtgacaggatgttcagggggcaggtgcgggcagaaaatcagctgcctccaagagtggtgagagaagctgtagagcatcctttatccagactggcacaacatgcagtccagaaggctgtgagatacgaggaaagggtcaccataaactgcaacctgactatgtcaaaaatgacacttggaatccgagagtgggtacgtgtggtggtatcacagatatacacccaccccatccccgcccaactgggagataagagacttacaggtttagcactttcaccactgggactagaaccctggatttagctagaggctggcttagaccttttcatggttcttctgtatgaaccacacaatttagaaccatactatttagagatgatcaatttatacgacctgcataaagcctgtctttccagaagaagctcaggttcaaaaaaaaaattgattcctctcttgtccttctcaatcttccctccttccttctttcctttcttcctgcctgcctgccttcctcattaaggatagacatgaactagtcacctgtatactctctgaggtatgctgttagtgctgacaacacattagttcaacctagaaaaactaaccctgttttattttatcttatctgagagtctgagacccctctttgatccttaaaaacttgccaatttcttgccaagcaaatatgtgcagggttttagagagccgtaggtaacagagacaaaatagaaacaacacacagaatttggagcaaagcctttagatctctaaagcttgaggccccactgctgctctaagcctgcctatggcaccaggttcctctgctatgagtccctctgcctcctgagggcagtgagtcctgggcgtagatagtctgtctgccttgggcactcacactgtagtctgtttccacaccttcctctggtagtccaatattcacccccattttcctctctagcccctgctcctacactctagtccacagactctgtggatatcctaatcacagagacagaaacagaggtgacactcagatgtgagtgatgaaacttacaatgctgtaaacaagactcaggacttagactgcctactgatgttcattcttgtgccatttgttcagcaaatatgtatttaggaactcctgtataacagaccttgtttccggttctggaaataaggtaataaacaaaccagagagacttgttttaaactcctggaatttataaaccaaagagatgtatgtgatgagaacagtacgactctggataagaaggaacctgttaccttaacactggccagtgcaaacccagtctggcagacatctgtgatcctctagacttgtaaggaatcctatagctgtatagctctttgcatttaagggcaaaactagacaagacagaacctcactctcatgaatccatgccctaagaaagagaagaaacttccctcataggaacattggtgcagtctcgcagttttcttatcaagtaggaaaattagaactgctaaaactttgtgccagaatttaagacaaataaattgcctggatcatgcattatttacaattatatttacaattatatacagatattttccctaatataaatctgttgatgaaccacttatgtggcatataaataggacttattaaaagttagatgcggtgctttagaagatatattaaaattattagagtctgacttaaatttttaatagtaatacaaaatataaagtaccacagccttgttcagaagaaacaggatttctgaaatccaccagaatagctttctaaaagccagtatcttatggcctttagtgggctgaaatacttataatgatggattggaaaaatggatgtttgagtgcataaggttcacgagtataagaaacaattggtacctcctaactatagattgtcagtttcagaggatgagaatgaatgtgccctcatcctcattttaattttgaaagacaatgcagatatccctactatagaatcattttttacatcaccacctatagagattaacaacatagatgtttccagctccctaagaggccaagaagtattaacccaaggtcagattcaggtaattgatcgtgactcacgaattttcagagatccacaatggttgtttttaaattttcagcagttatgtctttttctctggggagagggtattcaaagctcctcatgaggccattctggactacttttcccctcctgccccctgcccataaaacagtttacagaaataggtgtccagaccgtgggctgtagttcaccaactcctgctctagcctaattttgtctcattactagagcatggccattctgtggatgccagtgaagcctttctggggtttctctccaatgccttttaaagctttttcctacacagacacagtttactgtttagccaaaaaattaagataattcctccagacatctggagttcttgtgcagcttcctcctctctggtggtctttccttaaaaattctagctgcctcagcccccgctgattttgtaacctgtttccgcaactcaaaatttgccatgctctgttgctctcttccccattgtgtatgtgcagaaattgcccccatgttttggtgttttggcagaatcccagtcctgtgctgtctgctttccagtggctgaatacaattgtttcacatattctcttaatttgtgttacttgtatagagcaggatgctaaaggcaattggattctacaaagtgatcacgtcacagagaagccgccgacagaggtggagagagccacacagatagccagctgcctgtgctgcctgctcttcccctaattctgccatgagcccaatattcacctgcatcacaatcctttgtctgctggctgcaggtaagtccctgttctgcagttgtcagctccctgctctaagcctttcatccatgtcatcgaactccctcatgggctcagtctccaactcctgtctgctttctttacaggttctcctggtgaagaagtcgcccagactccaaaacatcttgtcagaggggaaggacagaaagcaaaattatattgtgccccaataaaaggacacagttaggttttttggtaccaacaggtcctgaaaaacgagttcaagttcttgatttccttccagaatgaaaatgtctttgatgaaacaggtatgcccaaggaaagattttcagctaagtgcctcccaaattcaccctgtagccttgagatccaggctacgaagcttgaggattcagcagtgtatttttgtgccagcagccaatccacaatgttaaatattagctaatcttaggacacagactcatcacggactcagctcaggaagcaggtggtatactaggttggaaggaaataacagaaactagagctagcttaagccaaaggggaatgtattataaggctaaatgtatgtcccatagaaccacaaagcaagaacacaggaacttcccagaaataaactgcaatgaaaccttagaaccggtggtcgcgcctgtaatcccagagctttgggaggccgaggcgggaggatcacaaagtcaggagatcaagaccatcctgactaacacggtgaaaccctgtctctactaaaaaaaaaaaaaaaaaaatagccgggcctagtggtgggcgcctgtagtcccagctactcgctactcgggaggctgaggcaggagaatggcgtgaaccgggaggcggagcttgcagtgagccgagatcgtgccactgcactccagcctggacgacagaacgagactccatctcaaaaaaacaaaaaacaaaaaaaaaccttagaaccatggcatggctgattgacaactcattttttatataccttgtcggcctcattattctcttttattataagttgtcttttctgtttcttaggtcttacagtgattagaaaattgcagatttaggtgttagccctccagtcaattgagaccaacgtgactttctctcatgctagattacaaatccagggtgcagggggaaaaaatgtgatcctgctttactcaagaatgggctcgtggaaatccaagggaattgaattattttgaacaagatagtatctgggagtctgtccctctgaccttgtggaccaaggatttcaaggggtggaatccagtcagaacatccaataggcacccatcacaagtgagaagttggggataatacattttctggaatatagagaccttgggaaaagagaagagtttggagaggggatcaaaaccttattatttagaacaatatcagaccacgtaaagagtctggttaatctctctttaagaaattaaaccggccaggtgtggtggctcacggctataatcccagcactttggaaggccaaaagcaagcagatcacctgaggttgggagttcaagatcagcctgaccaacatgaagaaaccccatccctactaaaaatacaaaattagccaggtgtggtggcacatgcctgtaatcccagctacttaggaggctgaggctgaagaattgcttgaacctgggagggggaggttgtggtgagccgagagcgcaccactgcactctagcctgggcaacaagagcgaaactctgtctcaaaacaataaataaataaataaaatagaaggaataaaaagaaattaaacctagataacacaaaaagcatgttcattttaagtgtgacaacttcagatcctacaaattcactaattggcctctatggcactgaaggagaacagattaatgtactcttggtgtaaaacatattaatgcacagagaattaaaagatcttcaggtatatgattcaaattgtaatgaggggcaatgtactcaacatcaatattcctaatgaggcattatggtatcaactgtacctaggcaggagactacacttatgttgagcagttatagaattcaaaataactctgttaaaatttgataatccattctgttcacagatctggtcaccacctagcattcgctttgagagaagttcctttattctctccagttacatctgctcttatttcagtataagttgaacccagttgtcttacttccagaagtccaaagttacttcttttcttgggaaaaaaatttactgtgactcctggaaacagaagttctcactttatcatttttctgatctatttaatattataccttctcattttaagttccttttcccgctctccagaagtgagtgttccttagcgttctgttctcggtccccctcaagcccagtcttgctgttggtggtctacatctttgcttttgtcacagggaagtcactcctctagatgctatcttcagctttttcttgaaatatttccattctaccaaaactgttctcctaaagattaaaattacgtatttcccagaccaaaagacgcatgtgtgtttctttgcctgcttgatctctttgaagctcttgacaatactgaccatgccctaagtcctgagcattaatttttgctcagtttcatttacatcattttcaactagtttctcattttctctctattctttttgttttcaatgcagctcccagaaactaaatctatccatttaatattctttttcccaggaaaattcttctcattctatttaaagtgtaatattctagtttaatgggaaagttttttgttgttgttgtttagccttttaaaaatctctactgaaaaaattttggatatgaaaattagccaggcatggtggcgggagcctgtaatcccagctactcaggaggctgaggcaggagaatcgcttgaaacttggaggcggaggttgcagtgagctgagactgcaccactgtgctccagcctgggcaatggagagagactccatctcaaaaaaaaaaaaaaaaagaaaagaaaagaaaaaattgtgaaatgtggtctgagacaacttttctcagtgtcacctgaggcatgggttaaacaggtatattctaggacaggttcagaatttcagagtcgaaatttcttgttggtggactttaggaatacgtatcattgctcctgagtatttctgttagtgctgaagttctgccccaaggacttcataagattaataacatcgcaaatcttctgtagtgctttaaaattttgttcttcatttttttattctcactttcttctctttccttttccacttcctcttatgttttccttaatcttcaactttcctaagcacctgcaagtgggattggagccttgtttaacatcgtccatgtagcaaaataaggatgaggccaaatatttgaaccaaggatccccatctcctatggaaggtgccctgaggttgtgggtgttgctggggacatgatgtcatggccagatcctacatcatgcggccaagggaacccagaactttcactgctctttgctactgcacatcagaacccatcgctgggagtgtcttgcactgcctgacctcaccatggatatctggctcctctgctgggtgaccctgtgtctcttggcggcaggtgggtccaggtatacttaaacatttgcataaagatgtttttggctgggcgtggtggctcacagccgtaatcccacctttttgggaggttgaggtgagtagatcaccagaggtcaagagttcgagaccagcctggtcaacgtggtgaaaccccttctctaccaaaaaatacaaaaattagccaggcgtggtagtgtgctcctgtagtcccagctacttgggaggctgaggtgggaggatcacttgaatctgggaggtagaggctgcagtgagcagagatcacgacatttcactccagcctgggcaacacagagagaccctatctcaaaaaaaaaaaagatgttttctttgggcttcccttcaccttctatggcttccgtcttcttccacaggacactcggagcctggagtcagccagacccccagacacaaggtcaccaacatgggacaggaggtgattctgaggtgcgatccatcttctggtcacatgtttgttcactggtaccgacagaatctgaggcaagaaatgaagttgctgatttccttccagtaccaaaacattgcagttgattcagggatgcccaaggaacgattcacagctgaaagacctaacggaacgtcttccacgctgaagatccatcccgcagagccgagggactcagccgtgtatctctacagtagcggtggcacagcatggctgagtcagttccctccagggtgcaaaccctctggctgctcttctcccagttgaactccaagaaaacatttgaaaaagcctcttccttatcttcctaccccagaagaaagaagcgagttgattgttgtggctgcagctgctaccgggagagtacaagaccatgaattaaggtcttaaatggtcatgatgggcacactggacaatgggctcctgaaactacccaaatacaaaatgagacattctgtggatcaggaggaatccacatgtttagaaggaagggccccagaccaatttccaagttcagagaccagctatctgaggttgatattacttaccaaaacacaaaaacattcctactgattttatctcaaacacagttctcctgcaaactcttcccccaccaacgtaccccagcagaggcaatgacatgtacatttatggaacagcctgttgactactgcagatccatctcttcaataagaccaactttccctggaggtcagtgactaaaccaaaccgcaaggcagacggcaacacgaccctcttaggggatggatgccagagaaacactgactaaaatccccactcggggactgtcctagcacattcagttcctcacacagctgcacaggggagcgcgacgttttattctgttacttcaaacactcatctgttcctctctctctcttgcaggccctagactcacagacactggaattagagtcagaaaaattgctttctaatcccaaaactggttttgtttactccccttcagctgtgaaatcttggcaaatgctcttacttctctgggactcagtgtcctcctcttcaaaattagagacttgctccacttagtctctaagatctgatacaaatatgattatttgacttgctatttatttatttatacaaatattagaatatttatgtatacatttaacataaatatatttatatttaataaaaacataaaatttataacattttatataaatttatatcaataatatatatttattgatatacttatatcacataagagatatataaatatatgcaaatatattttatgtaaattttaatacaaatataaaaaatacattttctatataagtatatataaatacttatatataaatgtattttatacatttatatataaatatatatataaatatatatttatatataaatacaaatacttatatatatttatatataagtattaatatataaatatatgtgtttatatattattatatataaataatatataaatatatgtgtttatatattattatatataaataatatataaatatatgtatttataatatttatctatttatctatctacagctattttacacatgtgacaatcagggttgcgatggaagacatcactacaagctggaaaatatgaacataattacatatgcagataacacagatccagagactatctgattgcaaggaacattatagatcacccctatataccataactttgaagctaatttgaaatgtggtttgtgaaagtattatacatttcctgcaatcccctccactgctgctagatggcagtaaaggaacgtgttagaaagtctggggaggggacctcatgatttatttaccgcgcagtcatgatttaccacgcaatcacggtttagtcttgttgtcctgtcataattaatagtatcctctttcacatacaaaagtgtctcaatttgaacattaaactatacggtcattgtagataatgacacaaatgatagcatctctgttgaaagtaaattgtttattaatgttgcagtaccttcatttctttgtttcggtttaatgaaatagattttttaaattatagaataaataaactcgaagctatagcattggtctgctttttgtcattttactatttaaatatatctcagccctacttacagtttgtattagcgatatgtggtgtatgaagcctcaacttaaaaactcagcttggtcttcgtagtgcttctgtcactgtctgcccagcacccactgcctctcaatgtgttccaacgtttcccaattcctacctgctaataaacctaccaggatatttccagacctattttctctgtgaagaaaaccaagcgacattgactttccctcattcatctactaatacataaatgtcaccacatgccagtgacaacggggtaaaataagtaataaaagtgaaataggataaaagaattgttatacatttattggctccggagaaatccaccctcttctctctagtctcctgcgcaccctgccaacaatgtcattggctgtaaaaatacctcatgttcatttaacactctacagtttactgagtaatttgttgtttcattttcatgctttaattatatgtttccaggttctctgagcttttgagctcctgctcttcccagatgggctttcataacaaggccagcccctttctctctccccttccgccagtgcccatcatttgaaccaaattttcttcctgtctctcttacttgattctttcccaacctgtgccttctgtttggtctcttaaaatatttccctattcagtgataactcccttaatgaaggcatctttattgactgccttggaaatcctcagaattatagaaacatctttcatgtccaccttggcatgttttatatgtttcacatatattttcataaataataaaaaagttatatattttccatacgtaataaaaatgtcccttcaacatgcgtaatatataacaagattagtgatcttccacctaatgtcttggacaatgtgacttctgtctgataggtatagtctttgacccctacttactcatgattaaagaaatacctttctctcaaaggaactatctgtgttcacagcgttaagtctcatcctggatgctgcaagaagacgttcaaatgtccactgcccacccaggtatgtgatgctgcctgccatgggtcactagaaggtgatagttaaaagtgtaggctctggaatcaaacaatgcagaccacaattctggctcctctgctcaaatgctatgtgaacgtgagcaagactgtgaacctctctatgcctcacttcctcacctctaaaatgaagataatagtacctacctgaggctgagcacagtggctcatgcctgtaaatcccagcattttgggaggccgaggtgggtggatcattccaggttgggagttcgagaccagcctgaccaacatggagaaaccctgtctcgactaaaaatacaaaattagctgggcgtggtggcacatacctgtaatcccagctactcaggaggctaagacaggagaatctcttgaactcgggaagcggaggttgtggtgagccaagattgcaccattacactccatcctggatgacaagagtgaaactctgtctcaataataataataataataataataataataataatacctacctgatagtattgggttaaataagataattcatgaaaatccctagtgtggtgcctaaaactcaaacgctaatatacataggtttggcctaatattatgaggtgttattatttaggattgctgtgcttcagctttttgttgagtttcacggtttggctcttactggaccactgacagaagcaactccatgactggttattctgtcattacccccagatactgtgcgataccttccaaatctactacaaacaacgagtgtgcatttctcttgcttgttccatccaagaggaaagagatctgtccagagatgtcattctgcttcagtcaacccagccgtgccagacaatatcagcataaatgtcaaaattaccatatgtggtcaacatatgctgatactgtgaccatatgctacatgggacttgttcccttaattgtgaataagagaactattcgtgtaggtgttattatccccaattttataggctcagaaagagtaataattggtccaatgtctcacaactgtatgtttcatggcaaagattggaaatgaagcaataacttttttctagtaaaattacaagaatgaccttaatttctttctaagcaaacgtagcgtatcatcacaacagttatgttaaatcagctcaataatctcctagaagaacatattataatattcattagaggtggtatgggctttaagagggagaaaaaactaggcaggatattgctatatgtgaagtaccatgctagatatttcacatatggtatttcatttcatccataccagcaacccaaaattatgttatttatccctgttttactaacaaagaaattgaagtttaaggagggtaagtgcaggatgaacactaagccaattgtagagctggcttttgtaatcagggattttatttaattcgatttgctctactatcatcatgttgaattaagaatggcaaagggctgggtgcactggctgacacctatagttctagctactcgggaaactgaggcaggagggttgcttgatcccaggagttcgaggctgcagtgagatatggtcatgccaccgaactccagcctgggtaacagaatgagaccctgtctctaaaaatttaaaaaaaaaataagaaattttcaaaaaagaataaaaattaaaatatatatatattttaaggctgggtgcggtggctcacgcctgtaatcccagcactttgggaggctgaggcgggcggatcacgaggcgggaaatcaagaccatcctggctaacatggtgaaaccccatctctactgaaaaatacaaaaaattagtcgggcgtagcggcgggcgccggtagtcccagctactcgggaggctgaggcaggagaatggcattaacccaggaggcggagcttgcagtgagctgaggatcatgctactgcactccagcctgggcgacagagtgagactccctctcaaaaacaacaacaacaacaacaacaacaaaaatttaaaaaaatgtgtgtgtgtgtgtgtgtgtgtgtgtatacatatatatactttttttttttttttaaagaatgagaaaggaactagaacaagcagagagaaaaagcccaggggcacgacagctaaaggatgactaatggaagttgaaaataggaagctgaaaggtacagaaatactgcgggaagacaaactacaaattatgtggagaaagacaagaataagaacagttcccagaggtctgaacacagcacattatgtcttcttgctatacagtggccaccaaacttgtcaatactgtaggcaaatgctagtgtcattgcttgtggctaagcagaaattttgacacttgggaaggttggcatgagattgaacagttgccatggtgacctgccatagatattttgattgatgatgagtagacacaaagtgccaatgcttaagacctagcttcagatacttaggatttagtggagaggctgttttgactatttcttttcttttcttttcttttgagacagagtgtcgctctgtctcccaggctggatggagtgcagtggcacgatctcggctcactgcaagctctgcctcccgggtttacgccattctcctgcctcagcctcccgagtagctgggactacaggcgcccactaccatgcccggctaattttatgtacttttagtagagaccgggtttcaccgtggtaaccaggatggtctccatctcctgacctcgtgatccgcccacctcggcctcccaaagtgctgggattacaggcgtgagccaccacgcccggcctgactatttctgacatctgacttaggctgcacaggaggtggggtttcttgacagggaggagctaatgtagggactgtgatgtgccaggctatttgggttggggtggagaaaccacagagagacagacataagctctctcccttatttataggacatacctactggtcctgccctaggccccagattctttgttagtggccttttctactgggagcaggtggggcattccagtttcaggtgttctgggacctggcttgaagtttttcactgatggctgcatcattaggctcgctcttttgccctttcctcagttcctgtctttttttcactttcagtcacctagaaacgacaatatccaatcagaagttgagaatgagacaagtttgggaagacattgaggaatgtctcatattgtggtattgataaatctagagatggggccacagcttgcttatagctgcttagagtaaaatgattaatcagaaaaagtaatttccaaggatttgtagtcagtctgcctgaggctaatacatttattcacagcaaaatatctgctgcctaaaatgactctgcaagttacccctacaataccagctactcagagtgatgcaatcacctggttgcaataggaaattatcctggcttcagttatctagtagaacaggtgtacatatcaatcttagagctcttgagaagacccagtagccccagacccgtgcaattatattataagcactcaagtaacttctcagctaaaggaagaatgatgaagcaggaaagagagaaaaatgatttgtattttttgtggttaacttgcttagaaattttagggaggataaactcaatcttgactaataggaaatttaattaatttagagagttattaaataatagctcctccacatcagggactatgataaatgttattaacaacacaaagaagaataagactttcccttctaggaacataccatttagtgggaagaaagacagacagatacacacacacatacacacacacatgcacatacacttaaacagaagtggtagaggctgagggaaatcccataagatagacataaagaaagtgctccatttgctcagagttagaggtgaaaaccaagaatattggcagaaaagaatgttttaaagcaactttgaatgattcttccaatgatattggaattagaaaatgaaggtttaggcagagtggggagcaggacagtcactgaagtgggaaggcacacatgggctcagcaaaaccggagcacagtgtaatatcattaggggtgaagtcaagaaaagtagcttaaaattaagccatagagaatccaaagattttaaattttcttttgatttcaaaaatgatcttttcatattattgagccagaaaataattaagtcatctatatattagacaaagttgtcaaaagcaactaaatggagggatgttaaaatgggaaagaaaaaagctagcacatttaacctatagctaacaatactgtattatacacttaaaaatgtgttagcagggtaagtctcatagcacaaacaataaaataaatttcttaaagaaaaagttaactattggaatagcctagacaagaaattatgaggctttgaactgaaacaacaggaacagaatttgaaagaggagaataaacccttgggatacagaatgaacaaaattttaacactgtctgctgtaaaaagtgagggagatcagagggattaaggtgacccttggatttcaagaataaaaatatggccaacaaatccagggaacacagatgaaagagaatattcaataaagaagacatacaaattcaaatggggtcattctgaaattgtggcacatttgagatatcctcatatctatccttataatcaaaacaaactcactatctgctcattctatgaccagtgacctcactcactgctgccttatacttcagggcttacacgtagacacacacacacacaggcacacacacacacacacacacacacacacactaagaaaagtagcttaaaattagaccatagagaatctaaaattttaaaatttagaacagatcttcatctgagccaggaaccattcatctatggcttctgtcatttaatagaataaacaaaatctgcatatgaatccatgcagaactccaagttcagcatggtttctcactgttctcagagctggtacctgaagctgcaggtgtgcattctctgccacactctgtaatggatgagtggaaattcttccataaagcttttgtctattgggagcaggtaagtctaggcaaagtatgcacaatttttttttctgggatacccagtggaaaaaaatagaaaagcatcatttttaaagtactgaaagaaaaaaagtcaacctgaaacaacctcattctagccagggaaaattagtcatttcaagaaaataagagacaatcagactagaaaggaagatataaaacaatctctaactacagttgacacttgacataatcttgtatatagaaaatatgaattctcatacacatacacatgtacacagacaactccactagatttaataggcaagctcagcaaggtgcagaataaaagattgataccaaaagttctattgtatgtctgtatgttagcaatgatatgaaaatgaaattaagagcagaattatgtgtataattccaacaaaataataaaatatcttggcataaattaaacaacaacaaaaaaaaaaaacagaaaagacttgtgggctgaaaggtgcaaaatattgttgaaattaaagacctaatagaaagatactccatgttcatgggttggagggcttaacattgttaagtggcaacactccccaaattgatttatagattcatctctgtcaaaatttcaaaattctagttgtattttttttttggaaactgataaaccaaagtaaaaattcatatggaagtcccaagtaccaagatcagccaaaacaatgttgtaaaagtagaaaaaatgttgggcaactcacacttcacaatttcaaagcttattactaaactacattattcaaaacagtatggttctggaacaggataaacatataaatcaatggaatagaattgagaaccctcaaataaattcataaatttatgggcaattaattttagacaagagtgccagccaagaccattcaatggggaaagaatggtaaatggtaccaggaaaactgtgtatgtatgtgtaaaagagtgaagttgtatcttgtctcataccataaacaaaaaataactcaaaatgaattaaagacctaaatgtagaagctaaaactcttggaagaaggcataggtatacatctttgtgaccttggtgtgtatgtaaccagcagcaaatccatatgggtctgcagtaaactcaattctagctcctaggaggagagaatttggccaaggggcagaaagaagtttaaggcagaggaaaagacccgggcaagttttagagtagtagtaaaaggaagcaaagtatacttggaagagggccaagcgggtgacctgagagacctaagggccctgtttagcccttgacttagggttttacacatcaccatggttctagggtttgtgtttctcctcccttgatgttttcaccttggggcaagctgtctgtgtgctcagtggcctgccagcacttgggaggggctgctcatgtagtgttcttactggagttgcgcacatgctcacttgaggcatttttcccttaccagtggggtgttcctagagtcatatgttagttaaactccgtcatttagcctctgtgcacatgcttgagcccactcgcccaactccagagatcttatcgggaagctgctgattacaagctccagatgtttttttatctatgtggaaactgtctttcccggatgctggttgtgactaattatcatctttgagagacagtttaacaaccacctgaccatcacctgatgatcacctgacattctggagtgtgtgtggtgggggtcggggggaggggggagagggggtctcttctcgtgccctcttcatatctgcctacctattctaacaggtatacatgaagcagattcgctgtgcactgttactaattccaggggattgtgttaattttccagggagaaatgcatgaaggatagtggaggtcatcaccatgccaaccaccacttcacagcccactgcatcttgaactgcaatttccatcacttgcctgattcatataacaagttgagcaaagcaaatttattactcacagacaggcagcaaaggacagtagaagcttaggattcatggtgagtttgtctctcaaggctcagaaaaactacacaggatggatagaatcttgcctgcatatgcctcatgttgcattgcagctgagtggctctgaaagtgcactctgtcctgggttttaaacccaggggctacatttaatgggttaaagcactgtgggacatcctgttccaggagagacaagaacagaggccaggattttcctgccagttcctcattatcacaggatgtggtattgctagcacatcctacagttattcttaagaactataaaagagaaaagggagatccacattgccaaggccatccagggacttatccttcagagtaggcagtgacttcttaaatatgaaactcaaaacacaggcaaccaaagaaaaagataaatttgacttaataacattttttaaagtctgtgcttcaaaggacactttcaagaaagacaaccccaaaatggatatatacttgcaaatcatatatctcacagggaattgtatcaaggatatataaagaactcttacaactcaataatataaagacaaataacctaatttaaaaatgagaaaggatctaaacatgtctccagagaagatctgcaaatggccaaaaaatacatgaaagatgctcagcatcattagtcgttagtgaaatgcaaatcaaaatcacaatgagataccacttcacacccagtaggctgtaataaagatacccagacaatagcaggtgtaggcatagatgtgaggaaattgggaccctcaagaattgctggtgccattgtgtaaaacagtccagcagttactcaaaagttaaacatagaatgaccatgtaacccagccatccctctcctaggtatacccctcagacaataaaaaatatgttcacgtaaaaaatttatacacacacttcaaacagtattattcatattactcaaaaagtggaaatatccatcaattgatgagtggattaactaaataggttttatttctaaaataaaactggtgataaaaaggaacaaagcactgatacatgctataccatggatgaacattgaaaagctatataaagtgaagaaggcaggcacaaaggggcacatattgttggacttcatttatataaaatgtctagaatagaccgggtgcagtgactcacgcctgtaatcccagcactttgggtggctgaggcaggcggatcatgaggtcaagagatcgagaccatcctggccaacatggtgaaaccccgtctatactaaaaatacaaaaattagcttgtagtggtgcgcgctcgtagtcccagctactcaggaggctgaggcagaagaatcacttgaacccgggaggcagaggttgcagtgagccgagatcgcaccactgcactccagcctggcaatagagcaagactcagtctccaacaacaaaaacagagtctaaaataggcaaattcttaaagacggaaaatagattaatgattgccatgggctgtgggaaggaataaaagtgaaatgacatctaatgataaagaatttctttctggggtgatagaaatattctggaattcatggtgacagttacagctttgtgaatatactaaaaaccacttaattatatatttgaaagggtggatgttatggtatgcaaattatatttcaattttaaagaaaatgtcaacactcaacatgaaaatattcaaaattacagctccaacatcagaataaagactatatttttggatctctaggattctgatatgagtaagaccatgagtcattattatttggacactaaatgttaacatgatcttatttattattcaagtcatacacctaactcctctggggtgcctatccaatggagtgagattgtgccttgtttcctgtatctttctttcactactcctgggacaaagtagactttcacataatttttattcaatgctgcaggatgagaaaggacagaaaaatgggaggaagaggctgggcgtggtggctcacgcctataatcccagcacttcaggaggccgaggtgggcagatcatgaggtcaggagatcgagatcatcctggctaacacgatgaaacccagtctctactaaaaacacaaaaaattagccaggcgtggtggtgggcgcctgtagtcccagctactcgggaggctgaggtaggagaatggcgtgaacccaggaggtggagcttgcagtgagccgagatcacgccactgcactccagcctgggtgacagagtgagactctgtctcaaataaataaataaaaaataaaaagggaggaaggaagatctctcaaacacaggcatcccatgcatgactacagagaatgatacagataggtatgcagaataacgggacctgaggtcagagggggaagtctttttagagtttgttctttgaatcacttatattgaaaattcaagtggaataagtgaaggtgacaaaagtgaattacaaatcttaaagttccctgaaaatgcttgaagccatcccttagctgaggtgtgggagtgaaaaagcaaactgagacaatgtgaaatcattttctatctcgaattttccctccagcaatgttggtgtccacttccctgtctcttaatgggtgcatctatatatcacctcttgtcaatacctctactcagcaacagccagaaaatagaaagattatataagccaataaaaggaaaataaaggaacaaaaaataagaatagtggagagatcatctacttgggaggctgaggtggggaggattgcttgagcccaggaatttgggaccagcctgggcaaacagcaagaccccatttatgaaaaaaatgaataacattatctgggtatggtggcttgtagtcctagctacttaggaggctgagatgaaggactcacttgactgatcctaggagattgaggctgtaatgagatatgattgcactgctgcactccagcctgggcagcggagctagatccagtcttgaaaaaaaaagaaaaaaaaggtgaagagggaaaaaaaagaacgagtaatagaggtgcttacttcacaacactaacctcacaaacacacactaagctaggttgtgtgtataggtcagaacaaaagatctaccatttaactgacatataagattggttctcgaaaccataggacccactggaaatggtgacctcacaggaagatgcatcttgtaggaggcagctgtgaggtctggttccccgacgtgctgcagcaagtgcctttgccctgcctgtgggctccctccatggccaactctgctatggacaccagagtactctgctgtgcggtcatctgtcttctgggggcaggtgagttttcagctaaaggatcaccatcactgggctttgttttgggctctacagcagattctcaaatataccctggacctctgtgttgaccaaatattttgtgaaaggtattgacatttatatgaaaacaaataattgcattatggagtaaaaagcaaaattcatgtgagtttttaaatgaacgcaggagacttcaaacaggctccttcactgtaagacattcatccttctgccattacaactctgtctcatgcagtctcttctcctctgaggtctctcaaatgccggcgtcatgcagaacccaagacacctggtcaggaggaggggacaggaggcaagactgagatgcagcccaatgaaaggacacagtcatgtttactggtatcggcagctcccagaggaaggtctgaaattcatggtttatctccagaaagaaaatatcatagatgagtcaggaatgccaaaggaacgattttctgctgaatttcccaaagagggccccagcatcctgaggatccagcaggtagtgcgaggagattcggcagcttatttctgtgccagctcaccacccacattgatgcagagccacatcctctcagtccacaaacatcctccagacctgccttggaaacagcggtgggccaggaagggaaacgcgttacctgtacagtgaacaggtcagctctacggtattctgcaagttgagggtggaaataggggaggattgtaggaatagcatgaaacatcccaggctacgctcagaaactaagactctgtcatccaaagaacataaagatttttaagaactagacataatttttcagtttcaacattgacttaatttgtcagtttcaaaacacttagcagtgtaactctgttttttactccacactgtatgtcaagttctatatttcatgctttacatcaataattttatttaatcaccaagacacacaagcaaaggaagtgctttcttccttttcaccaagagaaattatggtcctaggagttaatttttagaaagaaagagacagagagatgggggaagaaaggggaggggaggggacaggaggagaagggaagggaggggaagggaggggaggggaggggaggggagggaagggagaaggaaacctagtaggtggcaaaaagcatttggctcaaagggttatgatttttatctcacatcatgctgcttagcattcttttaggcataatccttgttctgttccttgctgagtacccgtgcaggtttttacggatgctaggttcaagaattcctgctataaaattatagaacatctgagagatgatggaaatagagttggataaatttgtctagaatttagggaaaaggtctggcccacagatattgttcattagaaatgtgtcacctcaactttttgtcttaatgtttgtttttattctcatcactcaacagatataggccacctacagaaaaagatttgttataatttgctttgatgaaacaatttcataaaatcaaaaggcagacaaaagcaaagtcatttcaaatatatgtgcagactaagtccagcctcaccagcttggagtataaaccatgtgattccactgcagtttttgccctttgattttctaaaatcatttaatgtactcctgcccctccctcactttacccaaaaggagaaaaacccagaaaatcttccaggaagacagaagagggacaccggcttgggagcctgagaaagatccagagagatttccagaaaaagaccaaccctgagaccccagcaaggctgcagagaagatggattccaaacttcatgccatttaaagcaccagacatgtaatttaaagaaacagtcttccaaaggtagtgctttacagggaggggaaaaaaaggcaaagaggaagaaagagggtcttctggcaattcaatagtgaggagaaaaagaggaaaaaggggaaaactgagaattc

SEQ ID NO: 94 - DNA, 100387 bp, Homo sapiens
aagcttgagcatttccccaatcctggcatccaccagcaccagccagacctatctgtaccactgtggcagcacatccgcagccctgcacagccagctgccctctgcacaaaaagggcagtcacaggctggaggtgggcactccttatggaagcccgtgtctcaaccagaagaaaaagctgccctttctgaagctcttcccagacttcccagcaatgagatctcattctatgtgtgctcctgcagcataaaacttagagtgagctgggtctgtcactgtagtgcggatgtgtaaatgcaaacaacgtaatgttattttgctcaatttggaatattctggtaattgtgcaaaggaatggtagcttctaacaagaaattcatatttcactttcttttcaggagagaagaaaaaagcagaaagcagctgggaagctttagcctgcttgagtgatctgggattctcaagtagcatacataacatcaccttggctttggttcctttagataccaagcatgtgttctgtggaggacaagaaaatccatttttttttgttataaagttataaacacacaagagaacaatccagttagggagaatgttaataaatacaacaaactctgccattagacctgaagataatcagctagtagaattatcaaagagattgtaagactcttactgagtacctgtttgaggtcctctgaggatagatgaaggaaggaacttaattcttaccatcactgtggcttggattagaatccatgagttccttaacttgtttttcttgtaaaatattataaaataatatagaacacacattttattttcctgtagcctgtagtcctctttagcacctaaagggagaagcgcatatcccggtgcaaaagggagctggttgcttgcttggcaaaaaaatgaattcaccaattggccaatctgctgaaagtcaaaatgaaaggctaatatatgagactgatgacagttcatggttcttggtataacttcaacagcgagtgaacatttttttctttgtctatagctttctttcagccatcgatcctcagttgtgtcttagcctcttatcagtccagctcactttgatactaaatttgattgttgtgtatctcagcaagaagcacgtctcacattctctgtattttatgtggtcatgagtgtgttcctgtcttattcttattttatgtggtgcatttttaaataggactgtacagaatacaagcatctatttgtatatgactctcatcttttatggggagaggtcagagtaggtgagcgtgcactttgattctctgctggaatctctttggattctatgtcccctgtcacatggtttattttcatatgcatatttctcatggttctcctgactcttttagcaatgctcattgcaggatattagaaattgtattacttctaatggcagaatgttagaaattgtgttgactcttaaggcaaaataaaatacccggactcacctttccattgctgtgtctattagtcgtggtcctggagatatcaaggagggacaaaaggagtatttgcaaaggtgtggcagggttaagggaacccagtaagagaagtagaagtagcctaagaacagcagaatctgtggctcttattcacattggcctgaaataagtaggagaggatgtggatcccaaagcatcaggtactgtagctctaaggcaaggctgcctataaggtgctgtggactttggtagggaaaagtaacctatataaaataatgaagcaagaggagagccagggcatagatgaatcagaacaagtggtgcccctacctccctctactctcctgccattgtctcccattagccaaactcactctggagttagagaagaagagagccagttaacataatacactgaggtcagcctctgaaggcagggtggatctggagaaattaacgtaaattatccagatcactacgcataagatggccttgagggtgctgaatcccaaactgtctggctaggtctgtgctgtgagctgataaagccctagtgttatttctggggaatctgtactcttaataatttacagacaaccaaggtctgctttggatctgatcagatagactaaatcttggggactttgcaccactggccactcaagggaggggctggaaatattttctgaggacaaaaaaatagaattagaaaatttggttgaatctagcgtcagagagatgacattaggacagccagggagagctggaacaagaaggtttaatcacaggctcctcaccctctgctgatgggcaggtgtgtgagctccagcatggagcacgacagcactaggtgggaggagggtgagagggtgatggggcagcctgggagctggagcagtgtaggcagaggagcaactgtctcatcacagaagcttctgccctcacccaacccttctgctggacagggagggagttcaggttgtggggagtactggacctcaggaagcatttatagggaggacacaggacagtgacatcacaggatatcccacccatcaggaaaatcaaggcccagaactcacttggcccttccccaggaggaccaagccctgaatcagatgcagtgctgcctgccccactgtgccatgggccccgggctcctctgctgggaactgctttatctcctgggagcagatgagtcctgtgcacagaacagcagccccattctcagatttcccacccctgtgtcctccactttacactggggaggacctccaggctgtctgctgtgctcatcctccatctgcttttcccacaggcccagtggaggctggagtcacccaaagtcccacacacctgatcaaaacgagaggacagcaagtgactctgagatgctctcctatctctgggcacagcagtgtgtcctggtaccaacaggccccgggtcaggggccccagtttatctttgaatatgctaatgagttaaggagatcagaaggaaacttccctaatcgattctcagggcgccagttccatgactgttgctctgagatgaatgtgagtgccttggagctgggggactcggccctgtatctctgtgccagaagcttggcacagccctgcagagtcactggaactctgtgcactaatctctctgcttccgtgtacagcagtctcagaccagacagctgtgagaacctggggccttcagggggaaagataaacaatttcaggactctgaacaaggctggcggaaacaaggccaggaggatatgctcagaggatggtgctgcttcaggaggttcacggcaaaattactttctttgtcggatgctgtacactatagtgatagagtagctggcactctcctttttagaaaaagaaattcattttggtgtcaggattgttcgacagatgtgtagtatagaaggtaaaatctcaagggtttgctttatataattaagggagaagaaattgagatttggtttggagaaacttgaggagagagaacatgattaaagattattaaataaatagaagtagagctaccagatgataaaaaattgtgttctctgcaacataacctgtcaaagttttcaattgctagaaaatacgcagcaaggccttgtagcaactggcatcaccccgaggccactctatgatggtcatcaccacgtagccagttgccctgtgggagggccctggagctggttccaatgtcttccttctggacttatatctcaattctcaaaacagaggaattcatttcactgctgatggtaaacagataaaggctctcccatttccccaaagatacattctgcttcccttgtatctctttctgacacttaccgcccagatccattaccttctgtgatcaaacacctcttcgaatatttcctaaaactctgcagcctttacattctctgcatttgtgctcagtatttccatggcctggaaggaccttctgtctcccaagaaacagccagaccctgcttatcggtcaaggatgggctcacacctgcttcctctttgcttcttaccatgacattccccagcattgtactataccaccatctttattattttcataggaaaagccaagtattaattaaatatataatgaatattatttgatgttgtgaaatctatgttaattcctgcttatatagagttctggaatattattacttttattcatgtgagggatattattaaccactaactatttcctggttagagatcaaagtcacttctgtgtaatgatagcaaatgtgagaaccagctgaatctgtttgaattacagctggcagtattattcatttcaaaatttttataatttagaagtaaatttttaaaatctagaaatccttttgtgaaatgcactgtctaaaatttagtaataatgaacctaaatacaaaatatgaaaacatatgggtgtaattaactgggattagctgtggaatatagggtttccaggctgggtttccttgatagcatcacactgtttaattgtatggcctttataattctggctggtctctaccatcttaacatattatttgcaattatgtaacaattgtttattttgtaatcaaaatgttggttcatgtgtcctttgactccattggctaagggtagatttgaaaatcaaccctaaattgactcttctgggaaagcatggacggggtgtgtaagagggtgggagtggcaggagtgggggcatctctctttctgatttggacaatttgagcatatcacgtcagagggtatgaatccatgagactgtagactgttggccacttggaggcgctgtggctccacagtgctgcagagaactcagcggaggggtgggagagtggccaagagaggaggactgaaggggatgccctggctgcctgctggcatcagtagagtggatggaattccctgagtggggcctggccatgtagagttaagcacagactatcattgccttgaaagagttggggtgccagaggcctcagtttgcatcaaggagggagtgtctctgctgctgcacgggcagtggagggtgaaggggctggggtggcaagggctggggaatcagtgtcagggcagggacagggcgggcagaggaaagtaaggtgtgatgtgggtatgttggtactgtgttcagtcctcctcacctttagcttctggcctgtgcaagacaggaatagtacatggagtagcagaacctgaggcctgccaaagagtacagtgggctggagtggcctgcaggggaaagtatgtcagtgtggtgacatcacaggtcaatgctcctatcaggaagaagggagcttaggaacttcagaatgcttactacagagacaccagccccaagctaggagatcctgccatgggcttcaggctcctctgctgtgtggccttttgtctcctgggagcaggtgagtcctgggcacaacttgaaagtctccgatcttcatttcttgtccctgaaatgcatgtgggccaacgatggcttcagcaggaggctttcttctgtgccttatggttaacttttgtcttctgacacacaggcccagtggattctggagtcacacaaaccccaaagcacctgatcacagcaactggacagcgagtgacgctgagatgctcccctaggtctggagacctctctgtgtactggtaccaacagagcctggaccagggcctccagttcctcattcagtattataatggagaagagagagcaaaaggaaacattcttgaacgattctccgcacaacagttccctgacttgcactctgaactaaacctgagctctctggagctgggggactcagctttgtatttctgtgccagcagcgtagcacagccctgcatgagcatcagccttctgtgcaataacattcctgccccactcaggaagtgacggtgaggggagggctgccagccagaggggctcaggccctggagagtggacaggcctttcccaggcactctctggtgcttctgtatgtgatctggtttactgctcactgaagctgtgtaagcgaaatattattttacctgtttatatatctgagggacagcagatgtcctggggctcatatttagtagctagctgaagtctattgtttcaacacctctgcactgtccctcctcactccggagatctgtccttttacctggtgtcccctttttgtgtccccaagagcaggatgctaaggtcatatatgaaactgtgatcatgataacttgttccctgacaagtccaatggacacatgatttccaggcaaaacatatccatctattctttattgtgatttaaaaaaaaaagaaagaaaagaaaggtgcagttttctgctctgtagccctcctatgggcaaggccaggtcatctcttttatggagactgtatgaggagggagctttcctaggttcacagcaaatagcaggaaacgttttttatggggcgtgtagtcttcctgtggcggatgcaatctgccatcagtgaaaggacatgaaaaattgttattcattagttaatattttttattcttttttttttttgagacagagtttcactcttgttgcccaggctggagtgcagtggtgctatcttggctcactgcaacctccacctcttgggttcaagagattctcctgccttagcctcccaggtggcctccaccacacctggccagttttgtgtttttagtagaggtggggtttctctttggtggccaggctggtctcaaactcccaatctcaggtgatcacctgccttggcttcccaacgtgctgggattatagagccattgcactaggccaattttttattctttatcaataaatcttttggggcatcctactttgtacaagggattatatcacatgaaatatacaatgaaaaaagataattggaaaaaagggaaattttttaaaaatgaagaaaagggtgtttcttgcatttgagggtatcaaagtctgtaatttttggtatattctaattagtttactcagtttctgatttatacgaatttcctctttcttctctttctctctttggctacctacacacttttgccagattttttaaagtttttagtaacaatatttaacatgagatctaccctttttatagacttataagcacacaatacagttttatactctgtagtcataacgttgtacagcagatctctagatcttattcatcttgcatgattgaaattttatacccattggcagcaactccccatttaccccattccccagaccctgaccgctaccattctagtctttgcttccatgagttggactattttagataactcatgtaaatgacattatgcagatttttgtctttttgtgattggcttatctcatttagcctaatgtcctaccaagtatagtggtgacagttttacttctatcttccacagttcactcgaatagctccttgaccaactgtaacccagaatcataaagataaaggcattcttagaaatataacttcttgtcctggctaagttaacttaacacaacccggtacgggatggattctcccaggttgaggcatctggtcacatacgagtttcaacctatcatggtctccaggatccatttttggcggcaccactgctgcccaggtgactgtggacacaacttagatgtctctgtcctagattttccaggccccagctactggcttttcttttaacctgtgccggcagtctccctccactcagacgcagggatctgcctcctgctcccatctccttcctgaacttccgccctgctggagttgcatggatatcagggcccctggtcaatgtgcggcagcccacggaggcactgggagggaagctcacctctagctgccttctggggcccagttctgttataccccaagcaagtgctctgttctccctttgggctccacagtatgagaaatgcacttcatggattcatagctgacccctagctcagtaatctgatgacaaactttgagtttcactcaaagtgaaactctcagagctgagggactagctctgcatttctctgatgagggtaagaatacagtgctgtagagatgccttcttccctgtgtagacctggcactaaacaggaaaaaccagacagggtaaaagtgcccaaatatgtctgagaagactgaaagaaaatttcctaagaaaatccttctcctgacttcattcagttcctagtaagacacacctcaccctctgacccccatatcagctggtccccccaggatatcacacgtcctagtatctaaccccacagcaactaattcagatactggcctctttccaacctccagaaacggtcttgccaatagagttttgttggccgggcgtggtggctcacgcctgtaatcccagcactttgggagcccgaggtctggtctggtcacctgaggtcaggagttccagaccagcctggccaacatattgtgaaactccgttccttccaaaaaaaaaaaattacaaaaattagctggtcatggtggcacatacctgtgggaagctgaggcaggagaattgcttaaacccaggaggcagaggttgctgtgagctgagatctcatcactgcacactccagcctgggcaacagagcaagactccatctcttaaaaaaaaaaaaaaaagagttttgtcctctgaccaccaggtctatctagatatctaggcagatttaatttacgattaatttgacctcttaatcccattaaagggagaatgaagagcgtatggtttcaatgtaaagtatattcattttattttgaatgagttggaactaagtagtaaactgaggatatcactccattatagtcttaaaacaacccatggtaaaacaaatctctttactaggactttctttttcacattttagttcctagttacccagagtccagaatagttaagagttgaagagtcatgactgagatggtctgtgggggtttataaatgagcattcacttgttgaacaagcctagggccactctctatggaagcagtttgtcagctggtttgggaatttttaatttaaaatatggtacgttctttatcttgtataagtataaagtctacaaatataatttgcatatataggctagtgcctgaagatttgggtaggacaaaaaggaaagaagagataatatttgcagatttaggaagtttcattatataaaacttcaagggctcaggggctctaatttgtgaagatagtataatgaagaagaattagaaaatcagaactctcttctggagcctacactggggttgtcctgagaaaagattatgatatgaggaacataatccatggtgtgcttagcagcccagagtgtagcagacagttcttgactcatgcagttgggggggtgagactggagacacttgtggaaggtactggctgttgaggctgtgctatagcctctccaaaaccccatagatgaatgtcagacaaatatactgccactatgaagaatattaaaagttagcagaattcataaacactcgcaataggcagcctgaaggtttaaattttagcatcatgacatatgacagtttgaagagctgtagttaaatgcacacaaaagagaattgaaacctgaacaagaaaaaagagactctcagaaatcattagataacttttttaaaagcattgaatgggatgtctagaaatgatccctaaaatgactgaaagaaagcagataaattgaagagcagattaaatgctcattgaagagattattattgacttcaaagacaaatcttaagaagttacccaaaacaacacaaaaaattaaatgtataatatgaaacagagaggaagcaacagagaagaaacaatggaggtttcagttatattcgaatatatgtaacatttcataagaattttccatttattcttatgtcattgaagtgtcagagaaagaaaataaggagaatgatatgaggtgatattgtgtgtgatgctagctgagaaatttccagagacatctaaagacctaaaacgtgagtttcaagaattcagataaatcccaggttaaatagttacctcagtgttaaaatagaagaatatgaatgatgaagacacaatttttcaagcagtccaagaaagacaaatatctcgcaaaggaatagactgagaccgacaggaacagtgaagaaagggagttaaaaatatctataaatgcagattatagtcctcattcatcaaagagacaaggagacctcggcagttcatattctgaccccttgggctggtgacctgaaatatatttggctgagtgttctcatttgtaaaccgaattcaatttgcagagatttttttttttttttttggaaatagagtctcgctctgtcgccaggctggaattcagtggcgcgatctcagctcactgcaacctccgcctcctgggttcaagcaattctcctgccttagcctcccgagtagctgggactaaaggcacacacaaccaagcccagctaatgtttgtatttttagtagagatggggtttcaccatgttggccagtctggcagagatttgagagaggtaactttaaaaattagagtcatataaagtgtaggttcaagaaatcttaggtccctataaattctctgacaaatctccaatctagcacagttatttactctctgaaattctggtaacaaagacaagcacagattacttttgcctgattcaatcatgtttcagacacaaagtcatctaaaatgcaaatatagtagtctgatagttcattatgtaaaattaacataaagagttgccgtttaaggaaatatgcaaatgttacctcttatgaacttcctgcttgataactgagtctgatgtgcatgaaggtgtggtgctcctagaaagatatggcttcagtgcaattgtccatcacacaagagagctgatagaagaaggcacagctttattggaaagaagaccacagaggagcctctagtggcttccatgacatcctctccgcccacctctgatttcagccttgctgctgtggacggtgccagttcccattcacctcttgctgacagtgcccttctgcagtgcctgcttggaatgttgctgcttcctgctctggggtcttctctggtatctgaatccacttgggctgtattcaaagacagccagaggtcctgatgctcctggtggaacaggacagggggacaaaagctccaacctgcccattcatgcagatactccagagagcaccctatgctcttggaggtcctgatggattccgtctcctgttgccccagcacaaatacaatattgcacctttatcctggtttctcccttccctattttgttttccttgctctcttacttcttcctggaatcatttcccaaataagctacatgcacccaagtctccccatcacagactttgtcttcagagacagactaaactgtggcagtgatggaatgaagcgaccatcaaaagaccctaccttttgaaggagacaactgtttatcttttattcatatggctacccattcatttaaaaagtcttatgatgatgtatataaactaatcttttccaaatccatttggattcatctggaattcccagcgttctcaggatggctctctgctcccttaaaacttcaaacctattttgaactgaataaacttggattctgtttacagaagtagaatctgcctggactcagataatcattcattcctttcttcattcaataaatatttaatgaattataggtgaagattagattcaagttttgtggcgcacaaagctgatacattttaggtagctctttgcaaaagagagtgcaaaatagcaaagagttgaaaagaccctgtgcaagtgagaaggcctgaggttattcttcatcggcttcatggcaaatacacaggtactgtccaggtacttgggaaacaccagtgcaaaaaacagacaaagcttcaagttgaggtagacaattttaacacataattgttataatttattatacttaataataaattaatttaaaagtagaaggatatattcctggtagatgcttatctccccggagaagttagagtgtcattgagaatatcaacattcttggtaaatcatacctgatttagggaatgatccttggagctctggaattctacatgccttaccttgcaaaatgaaggtcctgatctgaaaagttttttttttttttttttttttttttatgccctggcccaaccatgaggattggcttctttgctgtgtggctcttggtctcccaggatcaggtgagttctgggcatagatgagaaagtccttcctgggcttgtcgggccccaaccacggcctcctatgggggtgctcatgggcctcctccctgtctccacttctgattctgtgtcctctctcactggagcatgattgtgggaattacccatccaggttgcatcaagatgtgcaatagatagcctattgtatctgaaataactattgcagtgttatggactacatgtgagttttgcaccatagcacgtttacaaatccatcaaccttctcccatttggtgaatataagatctgctggatgggaatagaggattttcctgtgaccctagagactccaggtaggtgtagttcttggtgaacatttcatccatattcctaatgagcctcctcttttcttcacaggaagtacagtcactcaggggacttagatggggcagtgtttgtggcttcacctgaagcaaagggagaaaacacccccatgagaatacacagcagcctgagcttggatggtgacattcccatcaggtgtaatgaggtgctacagcatgtaacaagtcttcaagcggtcatgaccttgaacctggaacttggaacttggagacatttctggatgtcatttaaccgagggtatccctgtatgctggcatacaagtgtccagaggttaaacgaagaggaaaataattcaacttggagttgaattttgtgcaggaagtcataaaagtcaccaggactgctatgacaatgttctttagcctacagaaatattcataaaagtgaaaatagtattcaaataaagaatttctcatgatggaaataaaatatacatagaagaacaaattcccctattaaaatcagggaaagagcttaggagtttattagatttctttcaaaacagacctaaaaattattcaactctgttataaataatttgttcctgcggggaagagaaggggcatggcaggttagctccgcagttcaagcattcagcaggaacagtgacatcatcaagtcactgagagcccaacttcagtctgcccacagcagggctgggagacacaagatcctgccctggagctgaaatgggcacgaggctcttcttctatgtggccctttgtctgctgtgggcaggtgagggctggtcacaggagggcctccttccctggaattcccaaggcctcagtgcaggcttttctgttgggatgacagcatcagcatctgttgttctctattacaggacacagggatgctgaaatcacccagagcccaagacacaagatcacagagacaggaaggcaggtgaccttggcgtgtcaccagacttggaaccacaacaatatgttctggtatcgacaagacctgggacatgggctgaggctgatccattactcatatggtgttcaagacactaacaaaggagaagtctcagatggctacagtgtctctagatcaaacacagaggacctccccctcactctggagtctgctgcctcctcccagacatctgtatatttctgcgccagcagtgagtccacagtgctgcacagctgcctcctctctgcacataaagggcagttagaatgactgaggttgcctgtgctcccaagtcccagccttcacaggagtcggagagccctggctagcctgggggccatagagcaggggccatataaaccttgatgttgaggtccattcctaccccagtctcagaccaactggaggtcaccccaacacccttagcttctgcagttccctctttccttttgtaaaatggaaaaggcatctttagtcgagattcctaatttcgttgaaaatttgaaacccaccatattcttctctaccctaagggctgggtgacttttccacataccctttcccctaccctctactgcctttcaactcccaatcataaatctttgcccatgtggtctctgctcctgggggccctttattctaagggcaatagacccacgaggtcctatatcattagccatttacgtacctcttcatcatcattttgcaccatgttttccctggctctctgctccagccacactcccttacatgcagttatttcttcatatgtgtctgttgttttccaccctggggattgtttatataaattctttcttctgcactgagcatacataccacccacttagtcctacatctctacttcatttcttaaattaaagtgtatttcaggcacacttgctcttaattgtaaaaagcaaaaaagaaagtttactagaaaaatttaagaaaagcattttatgcattcagttgagggatgacatttttagaggagacaaaaagccacaagccaaaagaacaacattcataacgctagttgcattaaattgtttcaagccaaaacacaccataaaaaataaagttaagctacagcctgggaaaggcatgaggaatgcatacaaatgatgaaaaatcagtgtgacagagaacattcagtgtaacagagaacattcagaacatcactgaatacctgtagctcctccatggtttctggtctcccttgcagttggaggggtgggaacatgtcaccaggttctgaatagtgggataaaatgatgtcagctcatttcaagcctggcccttaaaaatattctgtggcaccatgttgagggtctctaaatgtactcccatgtttagagtgttggtatatggcatagagttgtactcatggctaagatttattaaagtgtcatagtaaatactctgcagcagaacatgtggagaaaacacacaggcagaatctggaggaattcacaggcaggcttccttatgctctcttcctctcaggaggggtcacacagagctctctctcctcccagcagcaaaaatgcattaacacacgtgcagtgtatctgccaagggagcccattacagacttagcacccaagaggttttagtagaagctggtcacacaggcacctactttttagcatgaaccaaaagtctagatcccaaaagaaaatctgatgttcagcataatattatttgcaacaccagcctaggaacgatgagccacccctgtcagtcaggagaaactttgcatcagttcagggcaccgttcaccagccaagctcccagatgtctgccagagtccaatcttgcaagcaggactttctaagcaccgcagtctccagcctcctgtcaactcttgtgcacagacactcttcaactctcttttgccatgtcctgaactcgggagctacacggtacagattgcctaatgataatatggaagcagcctggctcactgagtcagaatttggtggacaatcacagaagaaagctgctcatgccacactgggctttgtggtcatgggaagtaagacttcatagagctatgccagtgagattttaggatttgttttgtttgttttgttttctgtagcacagctgttcttgtctaagagaattagtatctagaatgagtaaaatattcttattacttagtattaagaagacagctcaataaaaatagcaatactgaggctgagtaggcaattcacacaagagtgaacataagttaccactaaacatgagaataacttcgcaaccttacttacaatcagaatattgcaacctgaaacagtaagttatgatttcaaaattactagattggatacttttccaaggaatgacagtcctacatttgagtagacatatgggctggtgaaaattgtttgtatatttattacaaaagataattacaactacatcagaaaacccactgtgggatatattgtgacaaaccacatttctggaaaatttatcaacgtatttaaatcacttgggttcctttcattgtctttaagttcaataatggagaatgcaactgtcagtgtttttcctattttgaaggtagtctttccatcttttaaaaagtatgataaaatgcacgtaacatataatttcatcactttattttttaaatgtacaattcaatgacattaagtacattcaccttgttgtggaattatcagcattatccatttccaaaattattttcatcaccccaaacagaaaccctgtacccattaagaaataacttcacattctccctcctctggcaaactctaatctattttgtatatgaacgaatttgcctattttagataatgaatttacatgaaaccaggcactatttttccttttgtttctggcttctttcacttagcataacgctttccaggtgtatccacattgtagcatttattagaacttcattctttttcattctcaataatattccattgtgtgtatataacacatttgtttattcattcattagtcaattgacatttgggtggtttccaccttgtagatattgagaacaatggtgcagtcaagactggcctggaaatatctgtttgattccttgttttcaattcttttgggtctatacctaggagtggaacttctgggtcctttggtaattctgtttctcgttttgagtaactaccaaaatatttctttgttgcagctgcacgattttggatttccaccagcagtgtccagtttcttcacaacatttccagaacttgttatttccttttctttttcttttttcttttcaaaaatatgatgatgatgattactgtttttatagccatcctagtaagtgtgaatgatatctcattgcggttttgatttgcatttccctaatgactaaagatgttaagtgtcttttcttgtgcctatgggcaatttgcataccttctttgaaggtaatatttattttatttgattgtgtttttagagtcgctattgactttagatttaagctggtgtacctgtgatgatactaaaggaaattgagattgagattaaacttctcttgggcgatttgttgttggctaagtgtttttaggtgcagtacttctgagacattttgggatactgtagagagagaaataagtaatttattgatatttctgggaattagattttttttacaaagagaagagagatataaataagaaacgggaagatgaggaagaaatctgtggtgctgacttgaattggagttattaatgcaaacttaaggttttaaagattatatatttcctaactttatccagagaagggtctaaaaaacaatacaaagtaaataaacgaatggctatatttgcttttttttgtgctccccagtaacaataggtacattattttattccaaatgttattccttataaaaggctgcttccatatcaagggaaggaaaagtgttagaacatcttttggtagaaatcaagaaaaaggtcagaaccaagaagacatgtccaaaatccacagaagcaatttcaaggggctccattagccaaatccgggtcaatgcaagctttaaagaagaataatgaggatactgaattgtaacaagttataaaaatctataaggctataatgacaatcaaaagagatagataagaatctcttcattacggaagaatgctagttgatatatctaatgagaaaatcaatgcaaccatccacataattatagacaaattccattagtagatgcctaaactaacagtttttgtttccttcaatactttgagttatactgttctactctctcctggcctgttgggtttctgctgagaaatctgctgaaggccatactggggctcctttaaatgtgatatgtttctcactgcatgctgcttttagtattctttctttgtctttgatttttggtaatttgattatattgtgtcttggtgaactcctttttgggttgaatttgattggcagcctccaagcttcctgcacctggatgttgctgtctttcctcagatttgggaaattttcaaccattatttccttatatatgtttttggggcctaacagcatatgtaccttgtttcaaagcatcaatacacagattattacttaattacaaagggtaaagggcacattcacaatggagagatcttggatcagtcatctcaaattaagcattgccaaaatgcataaaaatgacattccatattcttgtgattgaccagatgcaatgggaaatagacatcatctatggtgtatattttccaagtaattaacctctaataatatgaaaatttttatcgtgagctgttttacaagtaagctgaccaggacacttcaaaaatctatggtcatgaaaaacagaaaatataataagtgggtggaggagatgtatcattgaaaagtaactaaagagatccgacaacttcctgaaatacatgatctttgatattgtcccagaggaaaaagtaaatcaaaaccaagggacatggttttggtggggacaaaccacggccaaaccgcaggcggggctctggcaagacagtaggaatagatggagttgggaggaactccccccagtgccgcgcaaacactgtccaatattagccctgattctactgaggacagtgtagacatggccccagtatttctgacccatgaatggagggcctgagcctggtaactctgaaccattcattgaccagcaggcggcactagggtttgctggggttggcttgcttttaaatcagggctcagtgctgtctgaggagttaagtttaaaggaaaagtgtgacttcatcccagcatccagaatctagtttgcagatgtttgagtgtcctgtggaatgtgagccattaaacagaaactcttcatcttccagcaatgccagtatcctctgttcagcagggaaaccccaactgtagcaaatcattgagtgaataatgttctgggcttgcatcagggatagatggaggagagccaggagccagcctgcatgctcacagacccatataaagggagaaccacttcctcctcaggagaactcagagaaaccttagcaattcacctgtaccccacacctaacccattccagttgtgccctggatggtggacaggaggatgtaaagggaacataggagaggggagtggacaattccagacctctccagataggcttagctcaaataaccttgcaaatattctgaataagagccagatttcccagggctctggccttttcttccctgagcagcatgatgatgctccattcctgtcttgacaaggattctgtcatggatttcttggttgtgctgcccaggaagcaggtgaggcccaggaacaatgaggaatgtcgtccctggacttggcatgcctcactcgcaagcacaccatatgtgggtcctgtgattgataggtttgatagatggatacgtcctgtttccagccaccagcctctatcccctgaatgctgttgtcaactcagagccacaactctggtcacaaagatggagcaggtagtggcaccttaatgtgaagaaagtttccatcatgcaattgttacctggtgcctacatgagttagactcaaaccagcagctgtttacctcagtgatagaggatttatgacagaaacagagggctcttgtaattctatacccacaggtattcacctgataaccttcacatgtgtcccctaggttttggggactttgagcctgcctcactgaacacatatatcctcgttcccagctctctggacatgcatctccttgtattattgtcttatgccaactctcaggtgcttcatcccctaactcttcccatcctttaccccttaggcaatgaataaaagtatatttgtgactaatgttgccccattagaaaaaaaatgccagatactagccactgctgttcaattgtaacttatactaaatctgtaaggtttttttttttttaagatttcaacaaatctgattttagatttcttttttcttttgttttgttttttgagacggagtcttgctctgtcgcccaggctggagtgcagtggcgcgatctcggctcactgcaagctccacctcccgggttcacgccattctcctgcctcagtctccagagtagctgggactataggcatgtgccgccatgcccggctaattttttgtatttttagtagagacggggtttcaccgtgttacccaggatggtctcgatctcctgacctcgtgatccacccaccttggcctcccaaagtgctgggactacaggcgtgagccaccatacccggccgattttggatctcttactgtattcacaatgatattttcagggataagagagtccccacccatcttataagatatcagaactttcattacattgatgaccaagaaccataggcagaaccatgatgaagacttggtacacaatgcatcatgaagcttgataacagaaaagagaaagctggccattgaccttcaccaaaaatgaacccttccaactctctctcagggtattattttacccctttagcttagagcatgtcagctggttcaacatgcttctaggataaacctgtgtcaactaccccagctcccactctgtctaagctcatagcaatgagaaaatggagaacctggtaagacagaaatgcccagagagaaggatatacagataagacatagaggttactaattgttgtctgtattttgagttgcctttgacacattcaagtagaaacatgcagcagaagatggccctggagatgcagtgggtgatccaatcccccaagccctagagatgtgagtaaagacacttggatgaacttacacacagtccatgaatacgctaaagcaacttctagctctgttttagttcataacaactggtttctaagaacttaggcacttgtggagacaatgatgttactgtaggaactaccgtataaggacaggatgtcccacctcctctgctcctgttcacaaggaccctgaactggcaaagctcccatcctgccctgaccctgccatgagcaccaggcttctctgctggatggccctctgtctcctgggggcaggtgtgtcctaagaacaccatgatcatcccattggaaattccagtgatttcttcaatcatttctgtctttctgttttcaaattctgtctttttccccaacagaactctcagaagctgaagttgcccagtcccccagatataagattacagagaaaagccaggctgtggctttttggtgtgatcctatttctggccatgctaccctttactggtaccggcagatcctgggacagggcccggagcttctggttcaatttcaggatgagagtgtagtagatgattcacagttgcctaaggatcgattttctgcagagaggctcaaaggagtagactccactctcaagatccagcctgcagagcttggggactcggccatgtatctctgtgccagcagcttagccacagcgttgcagagactttctctcctgtgcacaaaactccagggctctctccgctctactcagctcacagcagcctttccttattcctcatcctctcagggaagaagtgagttttcagatatagctagggttcatatagtgggaggaaatgaactattttcttaaaacatgagcgctatagttgttggttgaaaacatgtcttagggatttgaaacacttctgggtgggaattcaagaaaccaaaactgaaagtgatttatcccagacctagtcctcaggggcagtgatggttgttcttctataaaaaatgcacacaatgttgtacgttaattaagaaaataaataaataaacttgaaaaataaaaacatttaatcaccaaaacgtgtgttaaactttaataatatagatattgattacatgcaagtgacaaacagcaggccctccttctgccgttgtcagcatctgaatgatgtgaatcttatctggctctggagcctcttcttgacctctcactggatgtttcatgcagtcaaatctcaacagacactgtgtgtttggaaatcttttccctctgtttttgtggaaatatgacaataataataatattgtaatgatgatgatgttgatcatttcagctatttcattcagcacactttaaacttcaaagaaatgcacacaaatggttatcctggaaacaattcccaaatcttaactcaaaatgaattttgcttctctggagtgctttaacttttcagtgtaacagacacagcccaacactataattaggcctgggccagctagttcagaggctggtgaagacacttccacctgcctgcctacttccttgtctgcccactaaaatagctccttagtgcattagatattcctgccagaacttcagaagcaatgaactgcccctggtccagttgtctcctctgataatgcactgtgtgtgtccaactctagtctctaccctaacttctgcccagattctcctgtactagaactcattctgaagtactggttagaatgtttgggaaggcagcttcctgggaatcctccgaaggaccatggctgtcagtgattccctcgtaacacttcttgagagcatcttgtatttcattgaacgtaggactcccatttatttcagtctgtctgctcctgttcacctctgagatctctgtggcttgtttgtgttgatttccttttgtgctgcttcttggtcatttgttcgtatttttccttataaacctgattatttttgacatcgtgccagacactatggttgtagaaataatttttggtctaggatggacatatctttctccagagataattttattgtgttttgtaaagtgcatggatacataaacaatccaggactccctgaaaaagaattaaaggcttgaggtgtcctggagcccctggagaacaggtttcctactagttccttgtttcaattcaagttcctcagtggtcaccctcagtaagttctggtcttagccattaccccccagcctgtgaatcagcttcctgagagctgggctgggatcagcaaatgcccctaagggcagtgactgctgtgttcactcccccaggctcctgccttctccaagattctggaccagttgtccctcataatgtttttgggatattaattagtttcagtttttgttagtgtggtaatttacccaactatttaaataataacagaagggttaattttgttacaagaaaggggtcctgatccaaccgccaagagagggttcttggatctcatgcaagaaagaattcagggtgattccacagtgaaaagccaaagcaagtttattaagaaagtaacatggtgaaagaacagctactccacagacagagtagggctttcccaaaagtaacaggaggagcgcatctaccctacgtacaatacttgtttatatataggataagaaaagatcgttgagagatgtgctctgctacaagggtttgtgataaaggattaactttcttaattactatgttttgcaagaatcagtattattatctttaaagagaaattaggaatgtttctgttctcaagatattggggtatcatgacactcccaagtctgggtctgtttagtaaacattattaatctgttgctttaaccataaacatctagaggttagggatacctgattttctgggaatgcagcccagcaaggcccagcctcattttttcacttaagatggagtcactctggtttgaacgcctctgacaatttgagtttcctcttctgtaattactcagatgaaggtcaaagaatttcatttaaagttttaattttctttgaatttcaatgtctgattcttagtctgtgatttgcttgatatttaacttaaatagcatagagaaatgttttactaaaactttaatttcgaggaaaggacttttttaaaaacttgaaggggatttataatcaaattgggacactcacttggttttgacattttatcatttagagtattattatgttgttaattacataaccttcgatgcttcattcgaacagggtaatgagaatagagagtaaatatttaaacttcatcagatctttgacacacctgacaaaaacaagcaatggggaaaggattccctatttaataaatggtgctgggaaaactggctagctatatgcggaaaactgaaactggaccctttcgttacaccttacacaaaaattaactcaagatggattaaatacttaaaagtaagacctaaaaccataaaaaccctagaagaaaacctaggcaataccattcaggacatagacatgggcaaagacttcatgactaaaacaccaaaagcaattgcaacaaaagccaaaatggacaaatgggatctaattaaactgaagagcttctgcacagcaaaagaaactatcatcagagtgaacaggcaacctacagaatgggagaaaatttttgcaatctatccatctgacaaagggctaatatccagaatctacaaggaacttaaacaaatttacaagaaaaaacaaagaaccccataaaaagggggcgaaggatatgaacagacgcttctcaaaggaagacatttatgctgccaacaaacatatgaaaaaaagctcatcatcactggtcattagagaaaggcaaatcaaaatcacaattagataccatcctatgccagttagaatggcgatcattaaaaagtcaggaaacaacagatgctggagaggatgtggagaaataggaacgcttttacactgatggtgggagtgtaaattagttcaaccattgtggaagacagtgcgacgattcctcagggacctagaaccagaaataccatttgacccagcaatcccattactgggtgtatatacccaaaagattataaatcattctactataaagacacatgcacatgtatgtttattgcagcactcttcacaatagcaaagactcgaaaccaacccaaatgcctatcaatgatagcctggataaaggaaatatggtacatatacaccatggaatactatgcagccataaaaaagaatgagttcatgtcctttgcagggacatggatgaagctggaaatcatcactctcagcaaactaacacaggagcagaaaaccaaacaccgcatgttctcattcatacggaggagctgaacaatgagagcatatgggcacagggaggggaacatcacacaccagggcctgttggggcgggggggtcaaggggagggatagcataaggagaaatacctaatgcagatgacgggttgatgggtgcagcaaaccaccatggcacatgtatacctatataacaaacctgcatgttctgcacacgtatcccagaacttaaagtataataaaaataaataaataaaataaagttgatcagagagcagagagtgaacatggaatttacttcattcctgcactgtcgtgactcatttgtgccatgttttgtgagcacacctgaggggcaggggtcagaattggagggagtcacaggtgtgtggctatcatcttttccttcccagtcccctggaaaggtgcttggttccacattttccatttgggggaacttccctaaagtgatacactggtttttgtctattatttgccaaatgtttcttatgggaagtgaaataagttatcttatttagtctcctcttcatctgaggttagtctctcttcatcatcatcctttcatcctggctactgagaaaaaaaagtagattcttttggtgctttttcaacatacactaagatcagtggagaactttctttccttacagggttggcctgtagtttgcaggggagagagaatggattaaattctgatacagaatagtgtgggttggcctatttgctctcctatctgagcactattagttattaacactgatattttatctccacttgtctgacttcaatgtccacctctcaggtggttccatcttaggccatagcaacattaagattgctttctgaccttctaacaccaacaaatcataattcccatatctccatgactcaacaaagcaaagcacaagtcccctgtgtcctggcaagagagcagatttgtgctgtttctgcctactggccacaaggaggcactgtggctttgttgtcatcagagtcaaatggggaggggcgaagatggctctctggaagattcttaagggaaaccctgggtttggccctagattcagggagctgggctgtctggaatgaaggctgggaatgaaggaattagagaccaaccaatttgcctgtattgttgtggagaagggttttgctctaaactgagctctgaatggggctgagtggcaggtgtgcttgcagtggatatatgtctgagcgcccttaagatgtggaggcacaagtagctggggtggtgcagtgcccaggttctgggctgggaaagcagagaagcagttttcatgttacaggagccttggagagcctggccccaaacccccaaaccagctcaggccagccctacctgctctgttaaaagtagaaggaagagcagggagagacggaggtgctaccctggaccatcggagggaccctgttccccagtgagggggcaatcacaattacaacaccagtagcatatacacttattaggcagacactagggtggagtagaacagagttttctccaccaagaccttttgctctcagcaggaaaatggcccagtctattaatagttcacctctgctactcacttcagactcctgtgtgtcccctggaagaaggtggggtctgggtagagatagtatcttttcttttggtttgaattaaagttctttccatatgactcgttcatttgcctctacctgtatcttgtatctagcttctgcctcttgtattcatgtgtgccttggacactataaagtatttgatttctactgctgctgtaatgaattaccactgattttggaggtttaaacaaaatacatttgctaccctacaatactggaggccaggagtccaaaatcagtgtaactgggccaaaatcaaggtgttggcaggcctgcgttctttcccagagctctaggggagaactgtttttctccccttttcagcttctagaggctaccagcgtgtcttggcttgttaccccattcaatcttcgaaaccaacagggactgactgagcctttgctcatgctgcatcactctgacactctttgtcctccctcttccacattttaggacccttgtgactacattggacccgcctggaaaatccaggacactctcccagtatgaaggtcagctgattgacaacctgactttgtgtggaactttaatttttcttttacaagtaacttaacacattcctaggttccagagattagacctggacgtggttggagggcctttgttctgcctaccaaacctaggaacttggtaagagggaggaaaacaaaatgatcacctggaaaccagaatactgaccaccgttttacatcccaggcctaacagacacaaaaagggatggagcccacaaggaaatagacacctcaggtctcacaagctcgtctgtaaactatttgctccttaggatcggaaagtactctggggtgcaggggactcagcagtatgcctctgtgccagcagcaaaaatgtggccctaaactgctccttcttggttagcaattaacccagttgaccaacccacagagcagaggcttctctcagctctgtacactctacaccctgagaggaagtcggcttctgagatgcaagactcttttataaggaaaagtccagttgtaaagattaagaaactttgagctttgctagaggtaaaaataggatgtaagtcaactctggagcatttaatttccaaatgtttatgaaaaagacaatcttcttcctgttttattgtatggatagagaatgagagagattctgtactctgggctttgcaaactcactagagttcaagaataaatacactcagagaggtctttcactgcaaagaagagctttgaaatcgaatgaactttcaggatatcagttcggctcctgtatctctaacaacgcagttgacatgcttgcccttcctagggatctcaggggccaactcctaactcacttgtggataattgaagtgcattcaaaggagtaggagcacagagacatcagggagaggaataggagagtttgcagagaatctggcttgctgtaagacaatgagttcatcttgaaataattggagtgtgaggtgcagatgaatatagttggcaagatcctaggtaagatatactatagagaaggctttatgaattggtaatatcaagacaaatccacagagagcctccgtaggtgtgcatttgtgtctcagatcaattatagttcagtcctgcctgattcatctcccagagatgcagcctccacttaaataaggagctttcaaattggaggtggtggcccattcagtgacgtcactgacagatgcatcttgtgtggataaaatgtcacaaaattaatttctttgttcatgctcacagaggccctggtctggaatgttccacttctgctctcactctgccatgggctcttggaccctctgtgtgtccctttatatcctggtagcgagtgagttctccgatatttattatggtcatgctggacctctgtctagatgactccttatattttccttattctttcccccaattctgtcttcttttatagcacacacagatgctggtgttatccagtcacccaggcacaaagtgacagagatgggacaatcagtaactctgagatgcgaaccaatttcaggccacaatgatcttctctggtacagacagacctttgtgcagggactggaattgctgaattacttctgcagctggaccctcgtagatgactcaggagtgtccaaggattgattctcagcacagatgcctgatgtatcattctccactctgaggatccagcccatggaacccagggacttgggcctatatttctgtgccagcagctttgccacagcactgcagaatctccccatctctgtgcagaaaccctggtgcttcctcttctccccacagctctcagcagtcgtcagcaaagtctttcctgctctctgctcaccatggctcacgcctataatcccagcactttgggaggccgaggtgggtggatcatgaagtcaggagatcgagaccatcctggctaacacagtgaaaccccgtctccactaaaaatacaaaaaattagccgggcacggtggcaagcgcctgtagtcccagctactcgagaggctgaggcaggagaatggcgtgaacccgggaggcggagcttgcagtaagccgagatcgtgccactgcacttcagcctgggcaacagagcaagactccatctcaaaaataaaataaaataaaaattaagtgggtttggagaatgacaaagacagaagatggtaggatattaacataaaaaaaatcatgtgtaggggataatgtagaaaatgtgttttgtgaatttctcacaaattgtctaaggagtcagaattcacaggcatgtaagataaaccttaattacccccactgtaggtttccttgtctccaggtatttgccatccgcattagcaagctgagagctcctgagaatggctatgtcttttgaactagtctgccctctgcattctattttcaccctaagctgtgaacagaaatttcccccacaagttttcttgattgtaaaagaaagttcttttctatggcattccttataatgttaatttcaacttaccatttatatagggattttgcattgcacttaaagagtaaacctcctgtgggtaatacaggcagtgaaataggttagatgtaagctgctcctcctggactctagggatctatttgtctttatcctgcttaaggagagccaagttctagctgaaggcctgtgccaactcacaggacactgacgtggtctcttccactgcctgcttggagctatccacatgtatccacacaggctgtctaaaagcacacaggcctggccagtcttactttgacctctttcctccctgatgctgtgtcctggacacgcatatctatatattttttctggtttatgccgcgtatttctacacagcacttgcaattcattctgaagaattataatttctttcttctatagtagtacttacatactgatcacttctcaacccctatcagggtatcattggcaggtgttgcaaactattcctgtattttgagtgcccaagacaatttgagtttacctgagttcttccatataggcctaggtttcacttgtcattgtctagttttgttatttaaaggccaaggttttcaagatcacaacagtacagaataaaattcaggaattttttaaaatgtacatcaaccgacctactctgtgtttatctattgtcctggtgtctcccttgctctttgggcttctctttgctgcctccagatcactttctttcctccttttttgaagcccagctccttacatacatgacgttagaacaggacccttcattgctgcacttgcttttttcccttcagaactctcttcccattcagtcctgtctgctactaatcctgtcatcattcttaacgactactcatcccacagaccatttttacattggtttggctcctcacttttgaggattttttttaacctactttttttttaagaattgcttccatgattacagtaaatatctactgaataaatgcatgtcttcctcagcttggagatttctgagggttgcaactttgtcgaatattttatccattaatcctaactgtgtatattagacaaggaaggtattaaaaatcatgttttaaatcagaaaatcaataaatagatttaaagagacaaatgcaaaacaaaactgtttagagctgctgttctgggctgaactacagatggactgtgtaagaaatagtaaaatcatctggtaatttcaacttatctttagaatctttggccggaacagctccagggaatcaagggatcataggtggaaagaaagacaaagaggttaaggaagtgagaactggctagggtagcattctctaccttaaggttttcaaacataatatcaaggtcctcagtttatttgtaatttttttgaggatgaaaggaaattatgcacgtgacccaaggtatacacaataaggaaactgacacatgactttgctgagatggaattatattaaagttctgtgacactcacaaactcatctcatgctgattagaaactgtgattggcaatgctgtgtgttacaaaaaaattaaaaaatgattcctttaaaaacattatttctttaaatcagcattttccaaaaatgggggaaatattaaatactatccaattttggtggtgcaaaaaataaaaaagcttaggggcttccagtacccctgacccagctgaccttcctttcccaggcccatgtcttttaatgtgcatttactcagggaaagggaagtgtggctgtgcaggaaaagtggcaatttagaaaacacaggctcaagggcttgatggagggtcccagaagagggcagggcactggtgatcagaggggattagagggcaagctgctagggtaagctgtgcatcagaagtggttccttttgtttccttcagcagtaaatttttattatcattattactttagctgtcctccatatctacttctttagtatggctggctacttctctttccaactctttatgcactaccgtggatctcaccctaggcagaaacaaatccccaaactctcaccagctgcgctcatgaaacaacccttcctggcaggctgtgatctcgccaagagcgatcaagttgatcaagctataaactgacttcatcactagtctaaagaggaaactgtggcaagaacagctgcaggagaaaccctaattacaatgggaggagagacataaggattttaaagcagttttcaaactagtccttctcaagaaccaaacatataagggatcactgggagctgtctctgaagtgggttaaagagaaaagaacagacaaagataaggttctgatgcctgctctctgttcctacagatctctccagaagtcactgtagacctgctacaatttccctcactttgctgtgacacagcctttcttcgttggttcctcctccctatgacttaaacctctctccctcccctcccctatctccattcttccagaaaattcctctgccattcccagagacttgcagaacactggggtttgaaatacattaaatagattttttttaattaataatgatctctgttaagtaacaaaagtttcatatgtgaattgtgcacaaaaaaattatagtaaacttctgagataatgttagaaggcttatgtaatgatcaggctagctttgatgaaggaatttgggactcagggtgagaagacaagataagttagtagacaataaaatgagttgatttattctgtagtagttgggaacttgtttaaaaaaatggagaaagaaattgttgaaaaccctaactccctcaagaggtctgggaatcctgtagcttacatggaatagaaactgaaagggaatcgcttgaacccaggaggcggaggttgcggtgagcagagaacatgccattccactccagcttgggtgacaagagcgaaactacatctcaaaaaaaaagcatgatcaaatttgaatcatagccaaatcttacaaaaattttatgtgaaatatttaattttgccaaaaaaaaaattgatgcaatgacctctacccttgttcacctttttttatcttcactatgtcacagagagtttggcacataatagatgataagtaaatttattttgactctattgagtaaatgacaataatatttcacattctctcaatataatagttgaattctatgtgtactttcttacttagcagagtttcacttcaaaaggggcttcgtcctccacatgaaatacaacagagagtcattatggctagtctcaattttccatacaacttctgcaatattccaagcaaatgtgtttccccagtcaggattaatgaccaatgttacacagtatcctaaccacatctaaagctggaatttgcaaacatccttttggaacaaagaaatttatgttataatagtatttatccagtctcatgatctggtaaaataaattcttcaccacaaccacattttcccaaaaccacattttttgaggctggaaacatcatcatctcagaaagcaccctaaaacactgtaagaaaaattcaccgtgctcggtaatagaatcttatcatccttgcaataagaagataccgtgtgtatgagtgcgagtgtgagagtgtgcatgtgtttatatgtgtgagtgtgtacacgtgtgtgtgtgcattttctcatggagactcatccacatgaaaatagtttctctttggatttcattactaagaggcactgggtgattggtggagctcataggcagttctggggagtgacaggaaatgtcagaccactcaatctgcctaagttatagctgatagggttgtttatttcaagactttctataaattaagaattaaatatgaaaaagcccagagacctccattataaaatgcactatctaaaattctgtaaataatccaagtacaaaatatgaagagatatgtgtctgatcaatcaaaaggagacatggaatatcgcgtttccaggctggatctgtttgatctcttcaagctgttttactttatgccctgtgttattcagggttctctctttcatcttatcatatgaattgcaattatgtaacatttatcagcaatcaaaatattggttaatgcacccttttgtctccactggctaagggtggatttgaagatcaaccctaaattggcctgcttgggaaagcattgaggttgtgtgtgtgagagggtagggtttgtaggagcggagatgcgggaatccctgttcctgatttggacaatcttgagcacatcagttcagaaagtgtgaatccatgagactctggacagttggccacgtggaggcactgtggcttcacaatgcagtggggaaccttggagagcggtgggagggtgacccaggagaggagggctgaagggaagcctggttgtctgctggcatcagcagggcaatctgagttcagagtggatcctgagttaaatactgccagagaagggtaggggtgccaaaggcctcaatttgccccaaggaaaaagtgtctctgtgtctgtatggacagtggagggtgctgaggctggggtgtcaagggctggggaatgcttctcaggacagggacagggtgggcaggcataggaaaataggggttgttgtgagcatgtgggcactgtgctgcacctgccccacctttcgtttaggggccctgcagaccaggaatggaacatggaatagcagagcctgaggcctgcctaagtatgcagtgagctcacagtgtcctgcagggccagtaactggaaaggccagtttcctatggaaatgccagaaatattcctgccctgactgaggttcaggatctggtggcagcctttcccaggcactctctgctgcttctttttttttttttttgagggcatcttgctttgctctgtcaccaaggctggagtacagtggcttgatctcagctcactgcagcctctgcctcctgggttcaaatgattctcctgtctcggcctcctaagtagctgggattacaggcacccaccacaacgcctggctaattttttgtatttttaataaagatggggtttcgccatgttggccaggctggtctcaaactcttgacttcaaacaatctgcctgcctcggcctcccaaagtgctgggattacaagtgtgagccactgtgcccggcccctctgctgcttctttatgtgacctgttttaattctgacagaaatcattcaaaataagtattatcttacctgtttatacatttgactgaagcagctttcctgggtctcacatacgcttagatggaagaaaccagacctggcattggatagatcagtagtagtgtgacagtagttaacatcagccaattatgcatttcaaaatagtgagaagagaataattcaaatgttcctagtctaaagaaaagataaatatttaagataatgcctatcccaatgaccatgatttgattatacaaatgtatcaatgatcatatctacctaaaaaatatgtacatctaatatacatcaataaatagtgaattaaaaaaaagataactggccgaagcctgttcctccaacacctctatccactgttcccactctgtagatttgtcctctcacctggccttccgtttccaggtccccattagcaggaggggaagattatgccacatatgtgatcattatagcctctccactgacaagtccaaggaggatatgacttccaggcaaaacatcttttcatctttcattgtgacaaaaatcaaggttcagttttctccactatagcagttctatgggtgaggccatgtgattgcttttatggaggctgtgtgaggagggaggtttctcagctgcacagcaaggaaataagatgttgtttaaggaaagcacagtcttccagtacctgatgcaatttaccatgagggaaaagacacaaataattgctattcattagttaattttattattttttaataagacacaaagtcatctaaaatgcaaagatagtagtctgataattaggtaaaactaacataaatggttgtgtcttaagggaaagtaaaaatgttgccccttacagcacttcctggttgatactgagtctgatatgcaagaaggtgtgatgctcccagaaagctgtgaattcagagcaatcagcaatcccacaaaagagctgatagaagaatgggcggttttattagaaagaagaggagcctctagtgccttccacgacatcctcactgcccacctctgatttcaggcttgctgtagtggacagttgtgtgcaagtccccattcgcctcgatctggcagtgcccttccacaggtgcatgctgggagtctctctgcttcttccccagggctgttccatgatattatctgagcccacctggcctgtactcaaagacagccagagctcctgatgcccctgctgagacagaggactaatgctccagcctgcccattcatgcagaaacttcagacagcattctgtgtgctcctgagaggccctgatggattccatctcctattgctccaacacaaactcttttgttgtttgtgcacttttatcctggcttcttccttccctattttatgtttcgttcctacttcttcttcctggaatcatttcccgaataagctacatgcacctaagtccccatcacagactttctcttcagggatagcctatactgtggcagtgatgggatgaagccaccatccaaagacccttccctttgaaggagacctttgtttttcttttactcataccgctacccattcgtttaaaaagtcttatgatgacatatataaactaatctcttccagattcatttggaattattcctgaattctcagcagcctcaggatggctctctgttcccttaaagctctgaacccaatttgaactgaatagacttgggttctctttacagaagcagagtttgcctggacccaggtaatcattcattccatttttcttccattcaacaaatctttaatgagctataggtgcagagtagattcaaattttgtggggcacaaagctgatacaattttaaggagctccttgcaaagaagaatgcaaaatgacaaagtgttggaaaggtcctgtgtgagtgagaaggcccgaggttattcttcattgatttcatggcaactacataggtactgtccaggtacttgggaaacaccagtggagaaaccagacagagcttcaagttgaggtagacacttccaaaaaattgttataacttattatactgaataataattaaaaagtaaaaggatatattccccatagatgcttatgtctccagagaagttagagtgctgttgaaagtactgacattctgggtagctcacacctcatttagggaaggatccttagagctctgggattctacgtgccgtatcccaaaaatgaaagtcctgcactgaaaagatttttttttcccctgccctggcccaaccacgaagattggcccctttgcttggtctcccaggaccagatgagttctgggcatagatgggaaagtccttccttggcttaccaggccccagccacggcctcccatggggatgctcatgggcctcctccctgtctccacttctgattctgtgtcctctctcactggagcatgattgtgggaattacccatccaggttgcatcaagatatgcaatagataatctattgtatctgaaataacaatagcagtgctattgactggatgtaagtttggtgccaaagcacgtttacacctcctccaatcttctcccatttagtgaatacaagatcttctgaatggaaatagaacatttccctgtgaccctagagactccagatagttgtagttctgggtgaacatttcatccacattcttaatgagcctcctcttttcttcataggaagtacagtcacttatgggacttaggtggtgagtgtttgtggcttcacctgaagcaaagggaaaaatcatcctcatgagaacacaccgcagcctgagcttggatggtgaggctcccatcaggtgcaatgaggtgctacagtgtgaaacaagacttcaaatgttaaagaccttgaatccacaactttgaaacctttctggatgtcagttgactcttttaaccaagggtatctctgtaggctgaaatacaaatatccagaggttaaacaaagtggaaaataattcaacttggagttgaattttgtacagagaagtcataaaagtcaccaggactgctatgacaatgctctttagactacagaaatattcataaatgttaaaacagcattcaaatgaagaatttagcataatgggagtaaaatacgcatagaagaacaaattcccctattaaaatcagggaatgagattacacattttaagatttctttcaaaacagatctacaaatttttcccaatctaagcttctcaagtatgtctataataaatgatttgttcctgtggggaagagaacagatgtggcaggttagctctgaggttcaagcatttagcagggacagtgacatcatcaagtcactgagagctcaacttcaatttgcccacagcagggctgggagacacaagatcctgccctggagctgaaatgggcaccaggctcttcttctatgtggccctttgtctgctgtgggcaggtgagggctggtcacaggagggcctccttccctggaattcccaaggactcaatgcaagcttttctgttgggatgacagcatcagtgtctgttgttctctattacaggacacagggatgctggaatcacccagagcccaagatacaagatcacagagacaggaaggcaggtgaccttgatgtgtcaccagacttggagccacagctatatgttctggtatcgacaagacctgggacatgggctgaggctgatctattactcagcagctgctgatattacagataaaggagaagtccccgatggctatgttgtctccagatccaagacagagaatttccccctcactctggagtcagctacccgctcccagacatctgtgtatttctgcgccagcagtgagtccacagtgctgcacagctgcctcctctctgcacggaaacggcagttagaaaaactgaggttgcctgtgcacccaagtctgggccccaccctgggacgtctcagcccccataggagtcacagagtcctgcccaggttgggggggtgtcttagagcaggggccatatgaccctcagtgctgtggctctattcctacccctgtctcagaccatctggagtttgccccaacacactaaccttgctgggtctttcttctgcagctctctttttctgcttgcagaatggaagagatattttgttgatattcctaattcccttcataatttcaaagccaacatattcttctctcccttatgggatcagtgacttcttcgtgtaaaccttaccgtatcctctactacccttcaactcacagacacaaatcttcccccatgtggtctctgctcctggctgcctttcttctaagggcaatagccctacaaggtcatctatcatttgcccttcacctgcttctccatcatcattttgtttttttttttttttttttttgagacggagtcttgctctgttgcccaggctggagtgcagtggcgcgatctcggctcactgcaagcccgcctcccgggttcgcgccattctcctgcctcagcctcccaagtagctgggactacaggtgcctgccacggcgcccggctaattttttgtatttttagtagagatggggtttcacggtgttagccaggatggtctcgatctcctgacctcgttattcacccgccttggcctcccaaagtgctgggattacaggcgtgagccactgcgcccagcctccatcatcattttgcattaagtttcccctggctttctgctttagccacactcccctacattcagtttacacgttcgcaggtgtagtgttgttttccaccctggggattgtttatgaataatagattatttctacttcactgagcatatgtgcctccaacttattcccaggcctccacttcattccttacataaaagtctatttcaggtacatttactcttaactgtaaaaagcaagacaaattttatgagagaaaaattaagaaatatatttttagcactcatttgaggaattagttttttagatgacacataagaaaaccactagccataaaaatatttgaggccgggcgcggtggctcatgcctgtaatcccagcactttgggaggctgaggcaggcggatcacttgaggttgggagttcaagatcagcctgaccaacatggagaaaccccgtctttactaaaaatagaaaattagctgggcatggggtgcatgcctgtaatcccacctactcaggaggctgaggcaggagaatcgcttgaacctgggaggcggaggttgctgtgagccgagatcatgccgctgcactccagcctgggcaacaagagcagaactccacctcaaaaaaaaaaaaaatttgtaactccagttgcattaaactaaacttttgtacaccaaaacatagcataagaaatgaaatgttaagccacagcacaggaaaaaaatgaggaatgcatgcagatgatgaaaaatcagtgtgacagagaagagtcaggctcacccatggctcctctatgcttcctggcctcatttgcacttggagggctgggagcatgtcaccaggttctgaatagtgggaggtgagtaaaaataatgttagcccaatttcaagtctggcccttaaaaatatcctgtaggtccatgctgagggtccctaagcgtactcccgtgtttagagatgtggtatatggcatagagttgtactcacagctaagattttctaacatgtcttagtaagttgtcagcagcagatcatatggagaaaacacaggtggaatctgaaggaatccaaactcaggcctccttatgctgtcttcctcccggggaggtcacacagggttctcgcttcactccgtagcaaaaatgcattaacacatgtgcagtgtttctaccaagtgagtccaacagagactcagcactcatgaggtttcagaggaggctggtcacaagcacatactgcctagcattaaccaaaaattcagactccagaaggaaatctggtgttcagtacaatactgtttgcaacaccagtttaggcacaacgagccgctcctctcagttaggagaaactttgccagtgcagggcatcactcatcagccaagtggccaaagatcagccaaagttcaatcttgcaagcaggcagtctcaagcctgctgtcaactcttttctgcacagacactcttcaactctcttttgccatgtgtggatgaatttgggaggtcatggcacagattataaactggaagcagcttggctccctgggtcataatttggtggacagccatggaaaaaaagctgctcatgccccactgggttttgtggtcatgagaggtaagacttgatagagttcagccactgagattttaggatttgttttatttatttttttttctgtagcataggtgtccttttctaataaacttagtacataaatgagtaaaacattcttattaataagacgacagcccaataaaaatggcaatactgaagctaaataggcaattcacacaagtgaacataagttaccactaaacatgagaataacttttcaaccttacttataatcagaatatagcaacctgaaataataagttatgattcaaaaattactagataggaaacttttcaaaggagtgacagtcctaaatctgaatagacatttgaactaatgaaaaccgtttatatatccactagaagagataatgacaaccacatcagaaaacccactgtgggatatattgtgactaatagcatttcttgagaaattatgagtgtatataaatcatttgggttccttttcttgtctttaggttcaatcgtagaaaattcaactttaagtatttatttttcctattgtaaaggtagttttttaaaacaatcttttaaaaaagtgggctgggcatggtggctcacacttgtaatcccagctactcaggaggctaaggcaggagaatcgcttgaacccagaggcacaggctgcaatgaaccaagattatgtcactgcactccagcctgggcgacagagtgagactccatttcaaaaaaaaagggtgggtggcagggggaaatatgtgtaacatataattttgtcactttatttttaaattgtacaattcagcagcattaagtacattcactatgttgggaaactgtcaccattatctgtttccaattttcttttcattgcctcaaacagaaactcaatacccactaaagaataactccacataccccctctttctgctaacctctaatctaatttctttctgaatgaatttgcctattgcagattatttatgtgaaaccatgcactatttttccttttgtgtcttgtatctttcacttagcttaatgctttcaaggtgcattcatattgtagcatttatcaaaacttcattccttttcatttctcaataatattttgttgtatgcatataccacatttgtttatccattcattaattgattaacatttgggttgtttctaccttgtagatattgggaataatggtgcaatgaatattggcctgaaaatatctgtttgatgccctgttttcaattcttttgggtatatacccaggagtgaaacttctgggtcctttggtaattctatgtttctccttttaagtaactaccaaaatggtttttttttggttgcagctgcacaattttagattcctaccagcaatgtcatttcttcacagaattgccagcatttatttcttgtttttcttttcaaaaatattatgatgatgatgattactattttgtatagccatcctagtcagtgtgaatgatatctcattgtggttgtgatttgcatttctctaatgactaaaaatgttaagtgccttttcttatgcctatgatcaatttgcacaccttctttggaggtaatgttttttgtctgattggcttttttggggtgtctcttgactttagaattatgttggtgtactgcgacaatgctaaaagaaattgagtttgaacttcatttgggaggtttgtggttggtagtgtttttagtgcggtacttcttaaacatttttaatataccatagaagagagaaaatgattacattttgatatgatttggctgtgtcccaacccaaatctcatcttgaattgtatctctcacaattcccacgtgttgtgggaggaaccctgtggggaggtgattgaattatgggggccgggtctttcctgctgtctcgtgatactaaatgagtctcttttagatctgatggttttaaaatgggattttccctgcacaagctctctcttttatgttaccatccaagtaagacatgacttgcccctccttgccttctgccatgattgtgaggcctccccagccatgtggaactgtaagtccattaagcctctttttcttctcagtctctggtatgtctttatcagcagcatgaaaatgaactaatacatatcgtgatttagggaactcctttttggattgaatttaactggcaacctctgagctttctgtacctggatattgctaactttttccagatttaaggaattttcaaccatgttttatatatgcttttgggactggaacaggatatggacatttttccaatgcatcactccacagattactactcagttacagagggtaaaagacatattaaaaatgaagagatccagtgtcagttacctcaaatatacattgacaaaactgcataaaaatgacattccacattcttgcaattgaccagatacaataggaaatacacatcatctgtggtgtatatttgccaagtaactaacctctaatagtatagaaattcttgttgtggctcattttacaactaagctgacctaggcacttcaaaaacttataatcatgaaaaacaggaaatataataagtgggtggaagagatgtataatttaaaagtaactaaggagaactgctaacctcatgaaatacgtgatctttgattttgttctagaggaaaagtgaatcaaaaccaagggacatgctgagacaactggagaaatttgaatgtgaagtatgtactagatgacaatgctatgtgaatgctaatgttttgagcgtaatagtgacatttgtggttatataagataatgccaattttttaggagactcattttattattaaggataaaatgcttcagaaattgagggcaaaatatatatagagagatcaagcaaaatcacaaaatgtacaatcggcacacagatatacattttaatattctgattgtttcattattctctcaccttttccatagatgttcagtttaaaaaaattgaagaaaaatattaacagaccaaaataaaatgttggtgttatttcagagtaataatgttgttgggtatttcttatattcatttttaatatatttgaaatactatgtcattaccataaaataaatatatcaaataaggtatcttttagtctagagtatacttttttaaataggagacaggctatgatttttaagaaagtcccaaaagaaaacaagagaatttgcagtctgaggacaaagcagcttggtatctctgagaccagtgcaaaacttagctagtaatgcatgtcaagaggccttttagcaaatatacaggactgttttctctgtatcaagagattctgagtattctacagtttggctgaaaactcaagaactttcaaaggtgactgaatgtaaagagaagagtagtgattttccaaagttagggctggacaatatgtatttgttcaacaaagagggaggctgtctcagtttatcctctgctgctatagcagaatacctgaggctgggaaaatgtataaagaaatttataaggaaaagggctttatttggcttgcaattctggaggctggaaagaccagtagggcatcaacatctactgaacttcttttgagggctttgtgctgtgtcacaacgtggaagagaagtgggagaaatgagcaggcctgtgcaaggagagccaggatgagcaagaccctcactttataacagcctgcttttatggtaactaatccagatgctggagagagagaactgactcctggcattaatctttgatgagggatctactcccatgacccaaacaattcccataaggctcacactaccccagaaaaatgtgagcaatgtgcctgtagcaacaccactacattgacgaataagcttcaacatgaattttggtgggaacacaccataactaaactataggacaggctctagcaagacagtaagaacaggtggaactaggaaaaaattttccctggtttctcacaaacactgtcctatattagccctgattctattgaagatagtatagaagtcccaccagtatctctaagccatggaccgaggacctaagtccagtgacactggccatcagaaggcactggggtttgatgatgctcaaatgtttttgaaacagggctcagtgctgcctgagatgttaagtttaaaggaaaagtgtgtatcctagtatccagtatcttgtttgcagaagttgtgagtagtcagtgaaatgtgaaatattaaaaaaaaaaaccctttatctttcattggtgctggcatgttctgctcagcagtaaaatctgaactgtagcaaatcttttgagtggagactcttctgggcttgcatgggaggtagatggaggaggaccaggagccagcctaaatgctcagagacccatgcaaagggaaaatgactggctcctcaggagaattcagagaaatgtgagcaatgcacctgtacctcacaccttacctattctagtcgtgctctggacaatgtatacgatgatgtaagggaaatataggagagtggacaattctagtttatgccagataggctattccaaattgcaggtagtaactacagatattcttaacaaaaaccggatttcccagggctctggccttttcttccctgagcagcacaatgaccagttcctgccttgacaagaattctgtcatagatttctcagttgcgctgcccaggaagcagatgaggcctgggaacaatgaggaatgtcttccctggacttgacatgcctcacttgcaagcacaccacatgcaggtcctgtggactgataggcttgatagacagataagtcctgtttccagctaccagcctccatcccctgaatgctgttgtcacccagaactgtaaacctggtcacaaagatggagcaggtagtggccccttaatgtgaagaaattttccatcatgcaattattacctggtgcctacatgagttggactcaaaccagcagatttttacctcagtagtaaaggatttatgacagaaacggatggctctggtaattctatacccacaggtattcacctgataaccttgacatgtgtcccctaggttttgcaggtttggtggaatatctctgagtgcacctcactgaacacatatatcctcattcccacctccctggacgtgcatctccttgtgttattgtcttatgccaactctgaggagcgccatcccctaactccttttatttcttattactcaggcaaggaataaaagtgcgtttgtgactaatgttgccccattagaaacaaaaaatagataatgaccactactgttcaactgtaatttacactagaggtatagctataaggttatttttagatttcagcaagtctctttgattttgcatttcttacaatatatactgatattttcagggataagagaattccccacctatcttcgataaaaatgagaacttactttcattgcactggtgacccaaaactacaggcagagccatgatgaaggcttggtacacaatgtatcatgaatgataacagtaaagaggaaactgttcattggccttcactaaaaatgaacccttccaactctgtgcccaggttattgttttatccctttagcttacagcgcgtcagctaattcaacaagcttctaggataaacttgtgtcaattaccccagcttctaagtgcataggaccaggaagatagagaacctagtaaaagagaaacacccaaagagaaggataattgctgataagacaaagaggtcactaactgatatctctgtttcgagttgccttcaactcgaaacatccagcagaggatgggcctagagatggagtaggagatccagtccccaagccctagagatgtgagtgaggacacttggctgaacttacacagtctgtgaatacagtaaagcaacttcgtgctctcttttagcttataataattggtttctaacaatgtaggcatttgtggaggcaatgatgtcactgtgggaactgccatgagaggacagggacgtccctcctcctctgcttttgctcacagtgaccctgattgggcaaagctcccatccttccctgaccctgccatgggcaccaggctcctctgctgggcggccctctgtctcctgggagcaggtgagtcctaggaacaccatgatcacattggatctctctgattatttcaatcatttccttctattttcaaattctgtctttttccttctcagaactcacagaagctggagttgcccagtctcccagatataagattatagagaaaaggcagagtgtggctttttggtgcaatcctatatctggccatgctaccctttactggtaccagcagatcctgggacagggcccaaagcttctgattcagtttcagaataacggtgtagtggatgattcacagttgcctaaggatcgattttctgcagagaggctcaaaggagtagactccactctcaagatccagcctgcaaagcttgaggactcggccgtgtatctctgtgccagcagcttagacacagtgtagcagagacacttccctcctgtgcagaaaaccagaaaaccgcaggactctctcctctctactcagctcacagcagcctttccttattcctcatcctcccaaggaagaagtgagttttcagatatagctaggactcatatagtgggaggaaataaactttttcttttcttttctttttttctttttgtttttgagatggagtcttgctccattgcccaggctggagtgcagtggtgcgatctgggctcactgcagtctctgcctcctgagttcaagtgattgtcctgcctcagcctccccagtagctgggatgacaggcatgtgccaccatgcccagctaatttctgtatttttagtagagacgggattttgatatgttggccaggctgatttcgaactcctgacctcaagtgattcgcccttctcggcatctcaaagcgctggaattacaagcttgagccactgtgcctggctggagataaactatttcttaaaacatgaaggctgcagttgttatttgaaaatatgtctaaggaatctgaaacacctatcggtgagaattcaagaaaccaaaactgaaagtgacttatcacagacttagtcttctggggtactaatagttgttcttgtatttaaaaaatgcatacaatattttatatcaattaaaaaatacgtaaatttgaaaaataaaaacatgcagtcaataaacatgtgtgataaactttaataatacagataatgattgtatgtgagtaacaatcagcaggttttctctctgcagttgtcagcatatgaataatttgaatcctatccttggtgacaccctggctctggagcctcctctagacctctcattggatgtattatgcaaccaaatctcaacaggtactatgtgtttggaaatctttttcccctgtttttgcagaaatatgctaataagagtaatgttaaagatgatgatgttgataatttcaactatttcattcggcaccctttaaatttcaaaaaaatgcacacaaatggatatcctggcaacgagtccaaaatcttagctcaaaatgaattctgctactccagagctttctaactcttccatgtaacaaacatatcccaacattatatggggctgggccagctagttcagagactgatgaggacactttcacttgtctgtcctcatatattaaaatagctccttagttgatatggtttgactgtgtccccacccaaatctcaacttgaattgtacctcccagaattcccacgtgttgtgggagggacccgggggatataattgaaccatgggggccagtctttcccatgctattctcatgatagtgaacaagtctcacgagatctcatgggcttatcaggggtttccacatttgcttcttcctcattttctcttgccgccaccatgtaagatgtgccttttgcttcctgccatgattctgaggcctccccagccatgtggaactgtaagtccaactaaacgtctttttcttccctgtcttgggtatgtctttatcagcagcatgaaaacagactaatacatcagtgcattagatattcctgaaagaacttcagaagcaattaactgcccctggtccagttgcctcctctgataatgcattgtgtgtgtccaactctagtctctaccctatcttctgcccagactgtcttgtactagaaattattctgaagtattggttagaatgtttggaaatgcagcttcctgggaatcttctgaaggactgtcactgtccctcagcccctcctgacttccctttccatccacctgactgcaggtcctaactgatggccatgaactcactacacatctcccttccttccctgcaatttactcagctaacaacacctcagccaggtggtgggtgaccatgaccatcctcctcttccttgccagaattttcatttggttctttttctgatctataaggtcatcttttacagtcagtcattccctcataaccttttttgagtgtatcttttatttcgttgagcataggacactcagttatttcagtctgtctgcttattttcacctctgtggtctttgtggacatttttgtatgtgtgctgcttctcagtcatttgtttgtatttttccttttaaacctgattatttttgacatcatgccagacactatggctgtagaaataatttctggtctaggatggatatatctttctccagagataattttattgtgctttgtaaagtgcatggatgcataaacaatccaggactccctggaacagaattaaaggcttgaggtgtcctggagaccctggaggacaggcttccttctagtgcattgattctattcaagtccctcaatggtcacattaagtaagttatggtctttgcctttacccctctggactgtgagtcagcttccttagtgctgggctgggatcagcaaatgcccataagggcagtgactgctgtgctcactcccgaggcccctgccttctccaagattctggcccagttattcctcatcgtatctttaggatatgaattagttgcagtttgttagtgtggttattttactcaagtacataaataataacaaaagcattaatctgagttccctcttctgtaattatacagattaaggtcaaaacattttatctgaagttttaattttctttgaattttaacgtcagattcttagtctgatttgtttgatatttgacttaaacagcgtagagatgttatacagaaactttaattttaaggaaagaactttttaaaaacttgaagtggatttataatcaaattgggacccttacttggttttgaggttttatcatttgagtatttttatgttatttattacataatctttgatgcttcactggatcataagacaagatgagaacagagagtgaatatttagacttgatcagagagcacaaagtgaacatggaattagtttctgttgatgaacagtccaactatgtaaaatatttaaagacatttattctgagccaaatatgagtgaccatggcctgtgaaacagccttctggaggtactgagatcagtgcccaaggtggtcagggtgcagcttggttttctacattttagggagacatgagacttgagacttcaatcaaacacaattaagagatacattgtttttggccagaaaggcagacacctggaggcaggagtggggagaggttccagcttaaaggtagatataaaatttttctggttgacaattggttgtctctcaggttaaattttaaaagagccctggctgggtaggaagtccattcagattattgggggccttttaattttatttgtggtttacacttcatttctgcattgttgtgatccatttgtgccatgttttttgagtacacctgagggccaggggtcagaactagagggagtcacagatgtgtgactatcatcttttcctacttaagcccaggcttctgggaaaacactttgctccacattttccatttgagggaacttgcctaaagcaatgctccagttttattctttctattgcttgccaaatcttccctatgggaagggaaataagttattttatttagtctcctcttcatctgaggttcctctctcttcattctctccctttcatcctggctactgggaataaaagcagattcttttggtgcttttttaaatgcactaagatcagtgggaaactttcttttccttatagggatggcctgtaatttggaggggagagagaatggattaaattctgattcaagacagtgttggtcggtctttttgccctcccatctgagccgggttgtttatggatattaaaactgatattatgtctccatctgtcagactgtaatgtccatctctcaggtggttccatcttaggtcataatgttgttttatgaccctccaacaccacaaattatggtatctcgtttccccatggctcaataaagggaagtgcaagtccttggtcttgacaaagagcacatttgtgctgttcctgcctactggccaccaggaggcactgtggcttcactgtcatccaaagtctatgggggaggggctgggattgctccctggaggatccttaatgaaaaccctggagttggacctagagtcagggagctgggttggaggtacctgcaatgaaggctgaaaataaagggattagagaccaacccttttgcctcttgatgcggagatgggttttgctgtaaattgagatttgaatagggctctgagtggcagatgggcttgcaagtggatgtaggtctgagctcactgaagacgtggaggcacaaggagctggggtggtgcggcgccgtgttctgggctggggaaagcagaaaagcagtgtttgtgtcacaggagccttgtagagcctggccccaagccggccgaggctagccctacctgttccgtcgaacgtagagggaagaacaggtagaaatggaggcgctaccctggaccatgtcagggggagcctgtcctcaggcagcttcaatcacaatgatgtaccagcagcatatacacttattagcaaggcttagggtggagtaggacagaattttctcccccaagaacctttgctcagggcgggaaaatgctgcagtctagttctaactctattactccagatgcctctgtgtccctggaagaaggtggggtctgggcatataaaagttttgtttgttttgcctgggttgatttcgtttttccatgtgatcgtgcatctgactctaccagtattttgtatccggcttctgcctctctctctcatgagtcccatggctactataaggtattcaatttctattgctgctgtaacgaattaccactaacttggtggcttacaaccacacaagtattaccttacagttctggaggtcagaagtccaaaatggatgttactgggctaaaatccaagcgttggcagggctgcattccttcctgaggctctagggaagaactgtttttctctccttttcagcttctagaggccaccagtgctccttggctcatggccccattcaatcttcaaagccagcaaggactggctgagactttgctcactctgcatactctgatgctcacttttcatcctccctcttccacattttaggaccattgtgattacattgggcccctatattaaggtcagctgattggcaagctcacttcacttggaacattaattcccctttatcaggtaatttaacacattccagggattaggcctgggcatggttgaaggggcattgttctgactaccaaacctaggcacctggtaatagggaggaaaacgtgttggtcaccttaaaaactgattgatgactaccgttttacattctggatctaacacacacaacaaagggatggaacccacaaggaaacagacacctcaggtcacacaagctcatctgtaaactatttgctccttaggatgggcaagtcccctggggcgcaggggactcagctgtatgcctctgtgccaacagcgaaaatgtggccttaaactgctccttcttctttgttagcaaataacctagttgaccaattcatagagcagaggttctctcagttctctatactctacaccccgagaggaagtcagttagtgagatgtaagattcttttataagaaaaagaccaggtgtaaagattaagaaatgctgagctttgctagaggtaagaataagatgtaaatcaactctggaacatttaatttccaaatctttgtgagaaagacaatcttgtttctgatttattgtgtggatagagaatgtgagagattctgtgctctgggctttgcaaactcaatagagttcaaggatcaataaactcggagagacccttcactgcaaagaagagctttgaaatctaatgagctttcgggacactgattcagctcctgtatctttaacaacgcggttgacatgcttgctcttcctgggtaactcagatgctaacttctaactcatttaaaggcatttgaagaactaggagcacagagtcaccagtgagaggaagaggagagtttgcagagaagctggcttgcaataaggcaatgagttcatctttaaatacttggagtttgaggtgcagatggatatagttggcaggctcctaggtaaggcatgttatggagaaggtgctatgaattgataatatcaaagcaaatctacagggatcctctgcaagtgtgcatctgtatctcagatcaattatagttgacttcagtcctgcctgattcatctcccaaaaatgtagtctgcctgattcatctcccaaaaatgtagcctccgcttaaaggagctttcaagttgggggtggtgggccattcagtgttgtcactaacagatgcatcttgtgggggtaaaatgtcccaaagtatcttttcttgcttatgttcataagggcgctggtctggaatgtgccacatctgttctcactctgccatggactcctggaccctctgtgtgtccctttgtatcctggtagcgagtgagtcctcatgtatttatcatcctcatgctgggcctctgtatagatgacttcctgtattttccttattctgtttcctaattttgcgttcttttatagcatgcacagatgctggcattatccagtcacccaagcatgaggtgacagaaatgggacaaacagtgactctgagatgtgagccaatttttggccacaatttccttttctggtacagagataccttcgtgcagggactggaattgctgagttacttccggagctgatctattatagataatgcaggtatgcccacagagcgattctcagctgagaggcctgatggatcattctctactctgaagatccagcctgcagagcagggggactcggccgtgtatgtctgtgcaagtcgcttagccacagcgctgcagaatctccccctccctgtgcagaaactctggtgcttcctcttttcctcacagctcccagcagtcctgagcaaagtctttcctgcctcaccctccccacaagaataattaagtgggtttggggcatggcaaagacataagatgatacaatatcaacatacaaaatcttgtgtaggagataatgtcgaaaatgcattttgcaaatttctcacaaattgtgtatggggtcataactcacacacaggtaggataaaccttaattacccacaccgtaggtttccctgccttcctgtatttgacactcccatccaaacagtgggagctcttcagaatggctatgtcttgtgaactactctgcccacttcattcccttctcactctaagccatgaacagaaatttcccctacaagtactctttattgtaaatgaaagttcttttctatgattgtggacattcctttataatgctaatttcaatttaccatttatatacggatttttacattaaacttaaagagatcttcagtgtggataatacaggcagtttaatacattagaagtaagctacccctcttggcctacagggatccatttgtttctatcttgcataaagcaagccaggtgctagctaaaggtctgtgtgcactcacaggacactgatgagatctcctccactgcctgttctggaactatcaatatgaatatacacagggtgtctaaaagcacacagggcctggtgtggtggctcatgcctgtaatctcagcactttgggaggctgaggcgggaggaatgcttgaggtggggagttcaagactaggctgggaaacagtgagattttgtctctaaaatatatatatattttaaaaattagcctggtatggcagtcttagctactcaggaggctgagttgagagggttgcttgagccctgaagttcgaggctggagtgagccatgatcatcgcaacagagtaagaccccaaatcacacacaaaaaataaataaataaagttaaaaaacatacacaggcctggccagtcttacttggccctctttcctccctgatgctgtgtcctgaacagccaaatctgtattttttttcttctggtttatgatacacatttctacacagcacttgcaatttattatgaagagttataatgtctttcttctatagtagtatttacatactgatgatttctcaacccctatcagtgtatcatcggcaattgttgcaaaatgtgcctgtattttgcatgcccaagacaatttgggtttacccgagttcttcgatagaggccctggtttcgcttgtcactgtcctatttttgttattcaaagactgagactttcaagatcagaatgatgcagaatgaaattcggggtatcctttaatgtacatcgagagacctactctgtgtttatatattgttttggtgtcttccttgctctttgggcttctctctgttgcctccagatcattttccttcctcctttgaagcccagctcctttacacacatgacattagaacagcacccttctttgctgcacttgcttctttcccttcagaactctcttctcattcagtccttctgtctgctactaatcttgtcatcattcctaatggctactcatcacacagaccatttttcattggttttgcttctcactttcttgacttcctcacttttgacattttatccattaatcctaacattgtatatctgacaaggaagatattaaaaatcacatgttttgaatcagtgaatcaataaacaggtttaaagagacaaatgcaaaacaaaattgtccagagctgctgttctgggctggactacagatagatcatgtaagaaataataaaatcatctggtaatttcaatttatctttagaatctttggacagaacagctccaggggagtcaagggatcatagatggtaagagagacaaagaggttaggaggtgagaactggctagggtggcagtccctaacctaaggttttcaaggataatatcaaggtcctcaatttcttttaaatattttttgaaagtgaaaggaaattatgcacatgacccaagctatacataataaggaaattgactcatgtctttgctgagatggaattatattaaagttctgtgaaattaacttatgggctcatctcatgctgattaaaaaccctgattgacagcgctgtgtgttacaaaaatgacaaaataaatgattactttaaaaacattattttaaaaaattagcatttgccaagagtgggggtaaaaaatgacatactgccagatggtacaaggaatggagacgtttgaggcttccagagcctctgacctagctcaccccactttcccgggcccgatgtcttctaaagttcatctgtgcagggaaagggaagtgtagttgtgcaggaaatacggcaggttaggaaatcacaggctctagagcttttacaggcttttacatcctgtgtatctgtgctatttccacagtctgcaacaaactgtattctccccaaacagggccagacactcctcatctatcaaggactgactcacatctaccttcctctttgcttcttaccctgacattccctggccactgcagtatatcattctgtttcctttacattcagaggaaaattcaggtatataattgatactactcgatgtttgtgaaatgaataaattaatgtccatttatacagagctctgaaatattatctattactgttttcccttcaaaaggggctccttttacttgaaatatgatggagagtcattatggctagtctcaattttccatacaatttctgcagtattccaagcaaatgtgttttcccagtcaggattaatgaccagtactacccagtaccctaactatatctaaagctggaattcacaaatgtccttttggaacaaagaaatttatgttataataatatttatccagtcctatgatccagtaaaagaaattcctcaccacaaccacacttttccaaaatcacatctttatgagtctggacacattatcaggggtgcatttcagaagtcaacctaaaacactgagagaaaaatttgttgtgctcagtaatagaatcttatccttgcaataagaagataccatgtgtgtatgtgtgtgtgtgtgagtgtatatgtgtgtatgagtgtgtgtgtgagagtgtatgtgtgagtgtgtatgagtgtgtgtgtatgtgcattttctcatgcagattcatccacatgaaaaagtttatctttggatcgcattacaaagaggcactgggtcacctggggagctcataggcacttctggctagtgatgggaaatgtcacaccactcaatctgcctaagttatagccaatagggttgtttatttcaagactttttataaattcagaattaaatatgtaaaaactagaagccccttttattaaatgcactatttaaaatttggtaataatgactctaaatacaaaatatgaagacacatgagatattaaatatttttccaagatcattctgctggatagcttcacactgtttaattgtatgtcctgtcttattcaggctcctctcttccaccttatcatatgaattgcaatgacataacaacgattaattttgcaatcaaaatgttggttaatacactcttttgtctccactggctaagggaggatttagagattaaccctaaattggcttatctgggaaagcttagagagggtgtatgtgagagggtgggggctgcaggagcgggatgcaggggtctctgttacggatttggacaatctagagctcatcagatcagaaggtgtgaatctgtgagactatggatctatagccacttggaggcgctgtgtctccgcaatgctgctgggaaccctggggaggggagggcaggtgacccagaagaggaaggctgaagagaatgcctggctgcctgctagcatcaggtgggggccatttgagttcagagtgagttctgagtttaacacagactcctcactgtccagagaagggtaggggtgcgaaaggcctcagtttgtaccaacaagagagtgtctctgtgtctgtctggccagtggatggtgaaggggctggggcatccagggcttgggaatcagtgtcagggcagggacagcggtgggtggagtaaggtgtgacatggacatgtggacactgtgctccacctttagtttcgggacccttcagggcaggaatgatacatggggtagcagagccaggcacccacctaagggtacagtgggcaaaggatggcctgcagaggaagtaaatagaaaggcaagtttcctatggtaatgccaaaacattcctgcccccactcagaaaaagaccatgaatgggatgttggcagccagaggggctcaggatctggtgatccgacaggcctttcccaggtaccctctgttgcttctttatgagacctgttttgattctaacagaaatcatgcaaaataagtattatttaactgtgtatacacttgactgaaataactttcctgggtcttgtacactcttagatggaagaaaccagacctggcgttggatagatcagtaatagggtgactgtagttaacatcaaccaattatgcatttcaaaatagctagaagagaataattcaaatgttcttaaggtaaagaaaagacaaatattaaagtgatgcctatcccaatgaccatgatttgattatattaatgtatcaaagatcacatctactaaaaaatatgtacatctaatatgtatcaataaatagttaattgaaaagaagataactagctgacgtctgttcctccagcacctctacctgctgtccccactctgcagatttgtcctctcacatggccttccctttccaggtccccattagcaggaggagaaagtcaggcattatatgtgatcactatactctctttgctgaaaagtccaaggaacatataacttccaggctaaacatattcattcatccttcattgtgacaaaaaagagaggtgcaattttctgcaccatagctgtcctatgaatgaggccaggtgatctctttcatgaaggatatgtgaggagagagatttctcagtgcacagcaaagggaatgggatgtttttaaaggaaagtgtagttttcctgtacctgatgtaatttattatgagggaaaagacacaaatcattattattcattagttaatttattgatttcataaacattttaagccccctgctttgtacaagggattgtgccacataaatttaaaagcgaaacaaaaaataaaatttagaaaaacagataagacaatttttaaaaacagtatgtttctcgcctttgacaatattaaggcaattaatatggaaatgtatttattgaattattttgaaatttatattttgctaattcaaaatactttaatgtttctgaattatacaaatgtcctttttaaaaatctttctctttagttacctacctccttttaccacctttttaaaaaaaattttagtgagaacatttaatatgagatctatcctcttaacaggcttttaagtatatagtagagtatcgtagtccacagacacaaggctgtacagtagatctctagaacttcctcatcctgcttaactgggaattttatacctgttgacagcaactccccattgccaccaatccctagcccttggaaaccaatgtttcagtttttacttccatgagtttgactatttaggttgcctcataaaagtagaaaaaggcacggtggctcacgcctgtaatcccagtactttgggaggccgaggtgggcacatcacgtgaggtcaggagttggagaccagcctggccaacatggtgaaaccctgcatctactaaaaatacaaaaattagctgggcacggtggcaggcgcctgtaatcccagctactcaggaggctgaggcaggaaaatcatttgaaaacgggaggtggaggttgcagcgagccgatattgtgccattgcactccagcctggtcaacaaggcgaaactccatctcaaaaaaaaaaaaaaaaaaaaaaaaagagtcgtgcagtatttgtctttctgtgtctggcttactcagttaccataatgtcctccaggtttatccacattgccacatatggtgagattttcttcttttttgatattatttccttgtgtgtatataacacatttaaggtctgtggtaataaatgcatagtatttgactgtttctataaaaccacacatcacacgagtaacagggtcatttgcagaggtgcaggctctgagtacattaatgcacctttatggttcaattatgctgcacggagaagattcagaaaaaaaaatcataattccatcctttattgtcattttactatacacaaaatagaagcccttcatttgcaaaattgcagttaattagaaattcaactgtcagaaaaagccttaagacacaaatgctattctcattttacagagaggagggaattgacccacaggttaaataacatgatcacattaaatggctattaggatgcagtaccgggggtccagctctgacctgtcagtctctaagccctgtgtttatagctctgtgctataaggcattttcatgaagagagacgcctacctttcaaaatcagagtatttgctctctacatccctttcagacctgctggctccaataacatcacagacagagatgaatgtatcctggagacagtatggggaaagaactctgaaaagatgccatggcacccagccctgactcccactctaacaccaccacatcactaactgagaccagctcttgacaggttaactttagtttggtttttgttttgttaatctataaaatgagactaatacagtctatctatagggctgtatatagaatttagtatcataaaatatctagcctataataggaatctaaatctcttgattccctttgttaatctcagacagcctcttccaccctcaccatgcacaaaggcagattcagacacactctgcctagaaatcttaagctgagaacttagaagtcacagaagtggaaatatatatacctgatgatccctcacatgaaattaactaaagaatgtagcatacatacctcctcagatagttaaaaatcaacttcattaatatatagattatataaacattacacattttaagtgaactgatgagtgattttggagcaatatatgtgtatagacccttcaatccccatccctattaagatgccgaacatttccatcacacagagagtgttctcattcctctctgcaatgcctccctccatccctgacaaccagtgatatttatcactagaaaattgttttgctcaggtacatttttaatggaaatttacaacctctaactattaaaacacttcctctttagtacacaggtaaatattcaagagagggaggtgctcccaaagatatttatggctattcccctcaatgacagaatggataaagaaaatgtgacacatatacaccatggaatactatgcagtcatatgaaagaatgagatcatgtcctttgcagggacatggatgaagctggaagccattatcctcagcaaactaatacaggaacagaaaaccaaacaccgcatgttttcacctagtgggagttgaacgaagagaacacatggacacagggaggggaacaacacacactggagcctgtcggagggcggagggtgagaggagggagagcattacgatgaatacctaatgcatgcggagcttaaagcctagatgacgggttgatgggtgcagcaaaccaccgtggcacatgtttacctatgtaacaaacctgcacattcttcacatgtatcccgaaacttaaagtaaaatttaaaaaatttaaaaaaagagagattttttatggctttagaagggtttcaaacccttccagaaccctgagagacacctgatccacgttagggataatcctgtctggagatagacaagatgatgaaatgacaccaaaaatcttcccacatggaagaggctatttccacataatttgttcattcattttcattattttttctcatacactcattcacttaaattattttataatgatattctgacaaaaactaatcatctccaagaacattattttgagtttccatcagacaatatttagctgtgattcagctctgcttcctgagcacatagagtgcactggggccaagtgaaccatgtgcaatagtgactaccttgagagataatgtcacattgagagaaggggtctctcttccttgaccgcaagtgtccaacccataaaacatgagccttgagctagaaaattcccctttctgttctggcgctgcctgggcaccaggctcttttgctgtgtgtccctctgttttctggaccagagaaatactgggcacatatgtggcatctactcattggtttgttggaccctagcttgcagataatagtaccaggtgttcctttgctgtgactttaacttctgtgttcttcacaggacacagtcccattgatgggatccaaagtaccattgatactgagtgacccagaccctggtcatgtacttgtgctaaaaaggaaaacagcacatggggaggtgagcagaatatgaaacacaattatggactcagaaacagccatacaacttattagcatcccgttgtttcaaaaaatcataagaatttgaagaacatgacaatgttatactgactgtggcgtcctaataagtgtgggactctgtgcaccaagatatgttatttgaattcctttttattgattactaaattaatggcaggaatcccacacaaagggatactccctatgaaacatgacaactcaaattaaaaaagagcactcttccttactctaaagtctgccctctctccccgagtccctcacgcataaggccacatttgtgcccctaggtcatgggcagcgctggttggccaccatcgtccacatgtagaaggcagtcagcaacgtgaagtggttctgcctactgcagtctcaccccagacatggaaagcaagagccctgggtggagctgaaggtgctcagctgggtttgtcagaagtctcatctgtcagtgagttgacaagaaacagagcaaaacgactcctccaatgttgacgagcctgcccctgggatttggaaacttcataacagaaaaaaccaatatagacaaaggattttaaacaggattaaggtcaattaagcaaattagaaaaggacacttgaaggagtatttgggacaggggaatcaaaagcaccaggaagacatgaggagtttccctaagactctagactacagcactagcactatgtagataactaacactaaaatattaattatatcattgaaaaaataaaatttacagtgaattacaaactgtttccaaaaggtcatgaaaatcttgtagacttgtttcaattcagacagatgtgttcttctcattctcagctgttcactggtgcatttattttggatttgaccatctggggaatgggtgtggcctctcctggcctctccctccctggggcccaggcagggagaatgtctcagaatgacttccttgagagtcctgctcccctttcatcaatgcacagatacagaagacccctccgtcatgcagcatctgccatgagcatcggcctcctgtgctgtgcagccttgtctctcctgtgggcaggtgggtcctgggcagagccccttgtgtgaatttcaaggcccagcgccttcccattggggctgcagcatcagctttgttctccttctctgcaggtccagtgaatgctggtgtcactcagaccccaaaattccaggtcctgaagacaggacagagcatgacactgcagtgtgcccaggatatgaaccatgaatacatgtcctggtatcgacaagacccaggcatggggctgaggctgattcattactcagttggtgctggtatcactgaccaaggagaagtccccaatggctacaatgtctccagatcaaccacagaggatttcccgctcaggctgctgtcggctgctccctcccagacatctgtgtacttctgtgccagcagttactccacagcgctacaaggccgtctcctctctgcacataaaggcagggaggttctgccctcctcccccacccaagactcagggatgccctgggcagagatctctgcgccaggaaccttggaacccacagtggccccaagtggcctggacagtatgagccttgctctgtgccaggtgcctctgcaggcatctcagccaggcctggactggtcccaggtcctcagatgtctcctttgttgctttctctggtctatccttggagctttccttttggggtggggccagggctttcccagctcctacttttctactcattatcctgagtccgaggcccccaggataaaacaggatttgcatttcagatccatctagactcccgtctctccctggtgaccctgttgcttcctctctctaatgtttcccccagcccccaccctcatgttttctctcctgtggcccacctttcccatctgggcagtcaccctccaaggcgttgctgggtctctcctccccccacctcctcgcccctctctactgcagccatgaggggagcccctgttctgtgcctccttccttcccatcacagagacttcaaaggccatttcctctgcccttgcatggagccttcctttctgcagtagccagctcctacctgtccttcatatctcagcatgatcaacccctcttgtgggaagcgctccctcccctcccatctgaaatcaactttcctctcataagctgtcacagattcatgtgtctgttagtaacctttagcacagcttggctttctcagatacttgtctggttatttttgtactccacccaatttttaagcccatgagagctaaggctgtgcctgctgcatttaccaacattggtgtctggcatgtagggagacccatttcacaaagaatggatgagtgaatgacaggctgagtgagtgatgagtgggtggataaaccaataataaaaacacactacatctactgtaacctggcagagatctagcattaagtacaagaaagcccatccctttgattgctgggctcaggtcggtcttggaaattgatggggaatcactatcatggcggccacacctggctcaaagcttcctcttgtggttgcagagcctgacctcctccaggtctctgtgctctccttcagggtctttccccacaacaaagcgagacagatcagagatccacttctagaattccatccttaaaggttgttccttgaaaccacttctggtaagaaaatctccattaagtttgcaacaaaacagggccgctacaagtttgagagtgtaacaaatttacgatcagaattagactttatgcatatgtgggaggagctgagaaagagaaggtctggaggagagaagtcagaaggcgagggagccagtcaatagccagggctcctgggggtctcggcaggacaggctggattggcagggacatgaaaggatcagagtatgccaggacatgcagtgggaccttgaaccgggggcacaggaaaaggccaaggaaacctgcttctggggaagctgttcccactctacgggggccacccctgcaggtgcactgccaaaacagcagcctggctgctgtttgccagcatttgggaagatgaactagacacagagtgcagaaggaacaagacttcctaggtctgttggatgcctctgtatctgctggtcacagactctcactgtctgaccacaatgacctgccaagtctaatagtgactgcttttcatctgtcttccaaattttaccaaatgtatccttgaccatctctaacccagaatgataagagaaatggcattctgggaaaggcaggctcttgcctttgcaaagctgacttaactcaattcagcccatgatggattcttccagattaaggcatcagatcacacaactgcctcaacctgccatggtccctggactcttctccatggacatctgtgttgcccaggtgaatgtggacacaatttgtatgtggatgttccagacactggctactaacttttcttttaatcctgtacctgaaatctccctccacccagagggtctataaatgtatgagatttattttttaaaaaatagaaatttgaattctattctgaatctttccttgggactggccagagagcatttttgacctactaacctatattgtgggtgtatttggccccccagagtgcagcagacacttcttgggcccatacatttgcgagttagactggagatgcctgtaaacatgacagattcttggtgttgttccctctcagtcccggcctctctggaatgtcgcagactaccatcaaacaaatagatccccagtatgaagtacataaggacacattaggagttagcaatgaggaaatgtgagcacaagcaacaaacgtttgaagtgcaaacccgaagactcaaaattttggcattataagatatgaaagtttggagagctacatttaaatgaacatgagagggaaaaagagaaacaaggaaaaagagaatgtctgaaaccatcaagtaactttcataaaaattgtcaaataatatatctagaaattcctcatacaaccactgaaaacaaaatggaaagtcaaacagttgattagctgctcctatgtcaaagatggatctgcaggagtgatctagaatgcagcacggaaaattaaaagtggaatatgaaaaagttaaagaacagggaagaaaagaaatggatgtttcccatatattagaatatgcaaatttttcataaattaccatttttttttgcatatgattgcagtttcaaatagataaaataggtagaatgttatgaggtgatatttatgagatgttagctgacaattatttagaggtgtttaaggacctaaattcagagtttccagaatcaaaatgaatctcaagtaagacaaatagtcaagtcatagggaaattgtataacatgagggacaaagagaagattttgaaagcagtcagaaagaaaagacagatacctcccataggaatagatggagaacaacagtaagtcaagatagtggttaaaaataaccattagctcaatcgtcattctccttcattagaggtgagattgattaaaaaaaaaacttttatacgtggaatatgaaaaaccaccactgtgagtttgctaccaagttatcttttctgaattacagttaacaaaggtgggaaatgatcccaaagaaaggcatgagggcagttcatgagggaacgcatgtgaggggacagtcctgttgggcacgtgtgactgggggaatggaggaggctggggcatgaatggggatggcagaggggaccctgacttgcaggaaagacaatgagctcacccttttgtgttctatgttaggggcactgttggtgcatcctacaggacatgcctagcagacagaagagcagctgtgggctggcaagatgaactcagagatgcagcgtgaggcctccgggtccagacagatctggagcccaaagcaatgagccatgcattgatgttgttaaaaaggagcttataaatatttaaagcagcacccaaatgtgttctaatagaaatgctggggccctgaggtcctggggattgacagaggaagtgatgtcactgtgggaaccgccctgtggagacaaggacgtcactcatcctctgctcctgctcatagtgacactgacctggtaaaacccccgtcctggcctgaccctgccatgggcaccaggctcctctgctgggtggtcctgggtttcctagggacaggtgagtccttagaacacaaagtagtttcagtttttttctgtgtgtaggcttgtgtgtgtgtgtgcgatgactacaaatattttccttattctgttgccaaattctatttccacagatcacacaggtgctggagtctcccagtccccaaggtacaaagtcgcaaagaggggacgggatgtagctctcaggtgtgattcaatttcgggtcatgtaaccctttattggtaccgacagaccctggggcagggctcagaggttctgacttactcccagagtgatgctcaacgagacaaatcagggcggcccagtggtcggttctctgcagagaggcctgagagatccgtctccactctgaagatccagcgcacagagcagggggactcagctgtgtatctctgtgccagcagcttagccacagcgtggcacagtcgcctcctttctgctcacaaacctcatccttctctctccttgcagctcctacaaacccttaacagaggcctctctttgctccttacttttcatgggaaaaaggtagatttggacctcagctgtcctttgggtagaaagagaccgcagattcattcctgaaacacagtgagtgcaaatgtaggtggtgaaaacaatcagagcccactgcgctctgggagtcctccgagccagctcactgttccaagcaaggagtcagtgtcttagccttggccttcagggcagacatgcatcttctataggtcttggaggctgctgtgctgcccacatccatgaggttgtcataggcaggaaacacgcctcttcttcatatgttggggcatttggaaggtctgaggctacatccccaggaacatctttcttcagaagcctgttctacccctgtcaccttggaagtttcttcaacaaaatatcaaacatctcttcctataaagtaaacgtctttgcaaatttgtggtccttattaataaatacaatggtgataacaataagacttcacttcttctgcctactttaagccaggtgtatcctttattttgtttgcatttgccattgctactgtcctgatagacagaagcgtgcattcaccaccgctgcccgttcaccttgattccctcaggaaatctaatttctagactctgagggttttcattgctgtcaaactcatttgatttgaaatcattttcctgaggcctttaactcaagaagtgttttatttataatattgaatatatttctttttcttttatttttcatattatattttattatacagtacttgttataaatagaagtacaatgattatattgtaatagaatcttcaactcgtctgtgggtgctgctgcagtttgtatctatgaaagcgaatgcactggtcagagctgatgtgattatggatcatgggtttcagggagtcttcggcatcagaccacttctccaagtctgggactcagtgtcccagatgcagccatgatagaggtgccctgagtctttcatagctgggaggggcatcatagccctcccaaattctctgatcagaaattgtggtggtacagacaccaaatttctttccccagagaatgatgatctctggtagggagctgctctagacccattttttattgtgccatcatcaaatcattccttgctcaggtaccctctgtctcctgggactgagtaaggccagggcacagatgggaattccttgtcttcctagaccttgtctctaactgctgccaccttcctccatgtgactcctgagacacctactcctaacagtggacaagctctgacactgaggctgaacagaacacagtccacaattgtaaccggtgctgcaacaacatgaaacaaaagcaatcaggacttccaacttatacagaaaatgaacatagaagagtagcaaagggcagatattactaatggacaaataggaaggaatcagtttctgctctaatgaaatcattcagttgtcttgagttaagcaggataaacatttcattgcaattacttcaagtcaaatgtagcagctccacaaccaaccagcatagctatttgctttgtgatcttggcagcttcaaaggactcagaaatcctttctctgcacaaacatccctttgtccattccaagacccaggatcacacactctgatcctatcatgaaaacaatgaggtgtgctatacttgctgcggcctcattttttgtgtgttgagtaggaagcactgaagaactttgaaagctttgctcttgagtctagggatgtgctggagccagcttgtatgagtcagaagaaccaaataggcatattactcttcccagctcccaagcagtgaagccatgttggccacttgaaatctaccatggtgggtatgctggtacaaccgaaattaggaaatgctaccagacatgcccccaccttcacagacaccccagtttatcagcacatccctggggtattttctgatgtccctgttatgccatttcttgtggggccaaaagggctcagaattcacctcccctctacttttgttcttagaagccatcacctaagggggcctcgattgttcctatttctattcaacctccagattctcttgctctgtaattctgtgtctcctgcaagcatgccagtctggaacatgacaactattttgaatgtaactaaaggtatcactgaaccagttcattatttacaaattatctttcctcgcatagaatattcagatgctggagtcattggcaacagagatggccaagtagcaactattcttctgtggcaacgagagaccctgtaaaaaggacaattttgctttggagactaagcacctccacaccagtcaggaatgactctgcttttactttaggctgagaggtcagaagggtcagaatactgagggtcagaggccctcagtattctcctttccaagacggagtatggccactctccatctcagtccctggaaggtgtccggagctccctgagaatccctgctctggggcagaatcaccaaggctcatcctcgccagctccccacaggctccagcagggctttcctgccaggtgcagggcacaggaatggctctatctgtctcttggttagagggaggctatgcaatgatgtttgtataagagggactgggattctgggtctccattaaagtatttgataatattttctttgttttttgttttattttgccatctcaccacttaggagagcaatcccttggtagttatattgtttttgcacttggtaaggtttttgtggttaagtcacattaagaaattgtgcctttttttcctgttcagctgtaacccaaggcagtgaaagaaacagcaataattttgaaagcagttacttatgcatcctatgataaaggtgttaagttccattgcccacatctaactttcagtctagtggaaatgaaaaggcacagttagggggcatgtgagcctgccatgagagaggtcaatgccaattgagaagtctgtgccaatccccagtactgtgggattgaaggggagggagagatgacctctccttcagaccatactcaacaaggagggagagggagttcatccatgggaacctgcggagaagcatatcccaggggcatctaactcagggtgcaggagcaaatcattggaaatgaaaatggtccacttcagctgtcacaggagacaggagaaagaaaagtcatacattccacagtcccctggctgattttcttccttatgatagtattttgcaccagcgtgtcctcatctcccgctgctcctctgcctctttcataatcatctcttccctctttgctgctcagatcagtggatgtgcattgtacaagctgatcatttcctgtagcagcacctttgctggtcttacttatgttcatccttattttgtgcattaggtattgctccctccaccattgcttatttccttgtaagaggtctcctttatatatttcaattttactttttattaatagacatttttaacttcatcttttgcttatctatgcttttggggtaacactgtcatttttggagggcatttttgtttatccttagtcattcagattaaataatctctttatacctcaacgtctgtgttttcttactatttaaaaccaaatattgtttcctttcattcctctccttctgttcctctttctttagatggtagttttaagggagaaaaagttagactataactggagctatgtgataagagttattcagaatgagggtgggatattaagattggtaactcaaagcaatagtcagggttagaagtagtgttgggatgagggtttagggaagctgctcataaaacctgcgggatggcacttctggaatattctggcagctcgctctgtagacatttctcagcagtccttgggccattgcagaagaaacaatgatgaaacttcacttattggccacaagatggcactgtggtccactgggaactaaagtactctgggcagtctgggagagcagcctaggagggaaagggttaagaaaaattcgggcttggatcccatattatgcagatgttgcagcagttttcagttattgctaggctacctacagctatgcaagaggcgggaagtccctctaatctttaatgacatctacagttgaagaatgttggctgggcagctttggtgtcagagcaggtgcagacagaggagcaactgcctcagaggaaaaggcgaaagaaaggggccggctgtgccctgagtccagtccatctctgctgcacttcatcttccctgcatgtctctccaggcaacagctttaacctccttgagtgatcagggattctacaagtttataagtcgtactgataacatcaccttggcttagattccattggataccaagcacgtgttctctggagggccaaaaatattgacaacaatttctaaaacacctaagtaaacaaactacagaaggaaaatattagtagatgcaccaaacagtgccgttagacctgaagataatcaatgagtagaattatcaaaaggagactataaataagtctctactaagtatttgtgggcatcgagcagtgtttgagtcctctcagggtagattaaggaaggaattcagctattatcttgactttggcttggatgaaaatccatgacctcctcaattgattttcttgtaaaatattacagaataatattgagcaaacattttatttttctccagcctgtatccctccttagcactaacaggtaaagcgaatacctagaggcaaggtttctttagttgggatccattaactgcaggactgggaggtccatagctaggcttcacagggagtgcaaaccccacgtgcagggaaccccgtgtgtctgtgctgtgcccaactcccctctgtgaggctgccaaagggggactgccgggtctcccaggaccccactcacaaagagggagaaagctgcttgctgggcaaaaaaatcaattcaccaattggccaatctgttgaaagccagaaagaaaagaaacgttcaattgtgagactgatgaatgcccaatttcccaagttataaaatgtatagcagctcatggttctcagaatgatttcaacagcatatgaagatatttttagaaagtttttgtttttctaaagcattccttgatattgatcctcacttgtttttcagcccactcatccgttgagcttaatttgatgccaaatttcaatgttgcctatttcagtcactgaccacttctcacattctccatatcttacacagatacgtgtgttcctgtcttttcttctttttgtgtgatgcatttttaaattgggctgtacagaatacaagcatacatttgtaaatgactgccatcttttatgcagtttagctgtttaatttttagtaacactttttattaaggtataattgagagtaaaacacaagtattaatacaaaaacatcctggtacattttgacaattgcatacaccagtgcaacagtaactgaaatgattataaaaaaaatttccatcactcaagaaagtgtcctcatgctcctttccaatcaatttctatcccagagataaaaacttttctgtttttatcaccattgactagctttgtctattcttcagcttcatataaatggaatcatattttattagttatttttctccaaaattagtatttctgaagtgtattcatattgttgtatcagtaggtcattctttcttatgactaatattccattgcataaatataccacaaattttttgtgcattctcttgttgatggatatccatgttattcctgtcttcaactattatgaataaagttgttgtgaacattcttgtggaaatctttcttttggacatatgcattcttttttcttcttttaaaacctacacttaagagtggaaatactgactcatagtgtagatgtgtgtgctatgcttgcgtgtccccacaaaagctcatgttgaaatttgtcagtggaatggtattgggaggtgggacagctatgactaggtcataagggatctgccctcagaaagaaatcaatgcccttattgggcgagtgacttagttttcccgggaatggtcttccaataaaaaggatgaattcagctgttttctctgtcttaagtgcttgcttccccttccttctgccttggataacagcaggaggacctcaccagctgtggccctttgatcctggacttcccagtctccacatctataagccaaataaacctcttgtctttatacattgcccagtccgtggtatttctctatagcagtaggaaagaaattgaaagaaaatatggcaccatgaggctgttgttataatacctgaaaatgtagaagcagctttggttaatgggaagtggctaatggatagaggttgaaagaattgggaggagcagactagcaaaagcctagactcctgaaaacagagcattaagggcaattctggtgaagtgtcagggggaaatgagggacaagctatcggaaattgaagcaaataccatccttgttataaatagcaaaaaccttggcaaaattgtgtcctgttctaggactttatggaatataaaattatgagccattcactaggatatcaactgaaagaaatatctaagcggcaaagcattcaggctactgtgtgactactttcgggcaccaggaaatttcacccagcaagaagggagccatgggaatagattttgcaaaccagcacagatggtaaccctacctccctctgctgtcctgtctcccataagccaaaccctgtgctgtgagctcttaaaatcctagaattatttctggggaatctatactcttaataatttatagacaacccaggtctgctttggatctgatcagacggactaaatcttggggactctgcaccactggccactgaagaaaggggctgggaatgttgatgggacaggaaaatataataagaaacattggtgtgaatctagtatcagaaagatgatgtgaggacaacaaggaagagctggaatgtgagggtttaatcacaggctcctcaccctccgctgatgggtaggtgtgttagctccagcatggagcaccaccgcactaggtgggggaagggtgagagggcaatggggcagcctgtgagctggggcaacgtaggcagagaaggaactgtgtcaccacagaaacttctgccttcacccatcccttcagctctgcaggacaggtagagactccaggatcatccactgagcactggacataaggaaggctgcatggggaggactcaggacagtgacatcacaggatacccctcctattaggaaaatcaaggcccagaattcactcggctcttccccaggaggaccaagccctgaatcaggtgcagtgctgcctgccccactgtgccatgggccctgggctcctctgctgggtgctgctttgtctcctgggagcaggtgagtcctgggcacaggacagcagccccattctcagctttcccacccatgtcctccactttaccttggggaggacctccaggctttctgctgtgctcatcctccatctgcttttcccacaggctcagtggagactggagtcacccaaagtcccacacacctgatcaaaacgagaggacagcaagtgactctgagatgctcttctcagtctgggcacaacactgtgtcctggtaccaacaggccctgggtcaggggccccagtttatctttcagtattatagggaggaagagaatggcagaggaaacttccctcctagattctcaggtctccagttccctaattatagctctgagctgaatgtgaacgccttggagctggacgactcggccctgtatctctgtgccagcagcttggcacagcccggcagagtctctgacattctatacataaacttcctgccttagctttgacttgagagctgcaggccccacccaggtttcactcctgcaagggaagcttttagttgtatggaaggcatgtgttgtgtcctactgagcacagagctctcccaaacagagcccaggtttcctatgccctgagtgtgccggcttctgtgcagcatcttcttgcagcttgtcacttcctgggtaacttcagtagaagagtgactgcggagccccagatgtgtgctagattctttgaatttgttatatagcttaaagtctttcaacaaccttgcacatcaatcattcttattcttccttgacagatggaagtctcagggacattcagtcattttccccagtgtctcctggcttgtaaggaccagaagtaggaaacaaagtagtgcatccattttccacctacccccctgctccatcatcaccttctgtgtcctggtcagtaagtcagagccctcaaactgccatctagtgaccagcagggcctcactagaggcttacatgtcttcaggggtcattactctggcctcttcattagaaactttgaggaatgttaaatttaacactttttaaaaatcatttatatgcattccctttgtctatccccagtctgcagcctacactttcatttttatggtgttttacacaagtttaatttaatgcaacaataactaaaaacaattttgtttgtgtgtagacaaaaactgctttctcatataaatgtctaatgatatttttctcaatttattctactaaaatttaagtttggattttcaccaataagaataaatgaacctgaaatatatctcatgtgagaaataagatagagacctaggaattggagggaagcacatatgttcagtgaagaagcaatcgtctgtcaaaaagagctctaaagtggacacctcgtgctgacagtggagagataattggaaggcaaattatcatgaaccttgtctgtctattgtcttgtagaagaaagacagccaggagcagagacaacatgggcgaatgtttatgactggacttcaggttgaaggttgcagcaggtagagggaggagttgcaggcagagggcagaatcactagctggcaggggcagtggcatcaccagtgactctactgacatccaggaattatgtccccaacgcacaagctgaaaaacctcccacaattcgccgaattttccctgaccctgccttggccaccagatttctcaatggtgcggccttttacctcctgggggcaggtgagtcccctaaagccttttccttggcttaccacatcctagcctaagcctttaccacaggtctacattattgaggtccctctttgggcactcaacttccttctatcatagacttcatagaatctgggataaccagatcccaagataccagagaacaaaggcaggatgcgaagcaacatggagatgcctaagactgtcatccatgacatgtgtaggtgttaataggagctgaagctggtgcacagctgatccgtcccagcacacactacagagaaattgctgagggtctgtaactttctctcaaagctaaatatgtggccttggtgtcagacagcctctcccagacctctgtgccctcttgcaccagcagtcaccccacagccaccttcctctgcacacaaagctcagtggaagatataggtggcctcgtcttcacgagactgcgatccaggcagcggaagacgttgtcccatagaagtctccccaacactgcccaggctggggccctcagatttctgagcagctctgtgcatgggaaactctgccctgtgctgagcttctcttccaggccagtctcagctggacgacggaatgtactttaccatgatgtgagtggatgcagcctctcttccaggcccctcctgcagctctggcctcagaagtccttttcttcagttattctcgaaaggaaagctcatttgaagttgtatatttgcagacagcattgacaacacaggtctatgttcttttccctgtcagcattcacaactccatcttccccacaccacgctcatatcagtcctcagcctcctccacgtgatgtccgctcccagctgtcctctcccttcctctgcatcctcacctccaggtcaaccacagatgcctcagttcaggccattcctcacgcgtcatgctcctcctaccaaagccctttccactccacgctgtatcctctgggtcaacacaagtctcttcttttttgttcttgctccaaatctcagtttaaccactaccatctctagggatacgctccttcaacagttttcctaggctgcacctccttaatataaatcctcacagctcataatgtgcgttagtattcatagatttaacaccattgtcattttccatgacttcgggtgactaatggactcttctcttgctctctagactgtaaaacgcatcattttagaaattgtggatgttttgttcctgattttatcatcagtacaaacagcggttccaggtgccagtggccaatcttgaaagaataaaggatggatagtgaaaggccctctgggttcccacgtagagtgtttcagaagtctggacgcattaagcgggaacctctatcccttcatctcctaggatctaatgagtcctggaaacagaggagaaatccctgtcatggatgagtaactggatccaagcctttctgcaggactgaatttcctaactgcccaccgccttcctggcttttctcctccaatgtccttccctcacaggtgtcctggatttgggagtctcacagacacagcacacctaatcattggcagagtggtgtgaaatatagcattaaatactggcattaaaaggtgatggaggctgggtgcagtggctcatgcttgtaataccagcactttgggaggtcaaggagggcagatgatgaggtcaggttagcctggctaacatgtgaaaccccaactctactaaaaatacaaaatcaaaattaaccagccgtggtggcagtcgcctatagtcccagctactcagtagactgaggccggagaatggcgtgaaccagggaggtggagctcacagtgagctgagatctcaccagtgtactccagcctgggcgagagagcaagactctttctaaaaaaaaaaagttcatggagaaaaaaacaaagggcttctccattctttgggtggctttgaggccatggtggctgctacactgaactatatcattagtctccatttccatgaattggtgggcaatgccagagacacagagttcatggtcaccagcttcctccagcccacacctgattttggttcagggcactgaagagagacctttgcttgttcccctcctttgccagttaggaaaggctggttgtgaggcagaggctccacatatagagcagggctatgtgttagtccctgaagaattgtgagagccattctgggtggaaataatcaaatatacaatcaccaaggatggcctacagatagaccgaagccccaattttgctggagtgatttgcatctatgctttaaagacaaatgcagttttatctctttaggcaataaagaccaaaaatagactagctattttaaataattgaaccttaaacagaccacagtcagaacatcttccctagggacagcattttcttccacccactcactaaagctctatttgagaaagctgtgtgctgttgataaacactggaatatcgttacaatcgacattgtaataatactgctacttggatcagaaacaaagagcatttctaaagcttgaacaatgtaaaactggaaacgagctctcactgagtttggaaatgcaggcactagagggtgctcatttctcttccttttccaatcaggggctattcaaaggctgttctagaacaaggggtgagatcctccacttccccgtggtgatcaggctttcacaggtagaagccttattagttcataatcagccaagctgacctcaccatcaaatgtatcgacctcgatgcttaccctcctcagcagtcagagactgtctgtgttcaccaggagctcgtgtgcttttacagagcacactttctcctcggtttagtaaaaaaaataaatgggccattatagggggttccataaacagaagctttctgtactttgcccatttagacactacaaattctgatgtctgacgaatagtgtaaacttaaagcttgcatgtggttaagaacttttaataaacaaattaaataatatatataatgaaaatgtcaataatgttctccaatccaatcccaccttccactcataaccaatattaacgctctggtgtgcttcttttcacccctcttttctgtgttcatgcacacctttctacccaagtacacctacagaaaatgggttcacctgtacactttacctgccacatgcatactcttttctgttaatatatcctggtctttattgttccagattggttgatatagatctaacttgctcctattagctgcttcacattgcataatgagggtagacaggtacatttgtgctctattgtctgattcctaaattctgccagatcttttccaaagtgactgaatggcctctttgtgcttccgagttcctctcaccccagcacccagttgatgattccagcgtttccatcactcatagtcctggcaggtttgagagctccattggttcctcctgcatgaggagacagggacggataaaaggatagacctttatcaaacctaacagagactacacggtatctcagttcaacctcataaagcattgaggggaatgttagtcttgttttatagatgagtctagatgaggctagaatccaggaaagttaatgaatggccttgcccacggtctcagagctaataaatggtggaggcagatgaagggcagtcagcctgcttccatgtggaattgatagaggggtcactggactttgacagaggggaagtctagaaccatctggggctgtcttcagatcggacaccagagttaagagagcctgtgtaccctacagcactgcagatagaagcatcatggtgttggcagtggggaggtactagagtgtgtaagtggttagtggcctacaaccagaagacctgagttttgagaaaattattcccatcacaagatgtagcagagacagtgatatggatatactagaccagagagctctgtgaggagctctgtgaggagctgtggcctaatcatgcatcaggccacgtttgtgtccataggtcatgggcagtgctgggtggccaccatcattcatacagagagggcagtcagcagcgtgaggtggttctgcctgctgtggtctcaccccaggcatggaaagcaagagccctgggagcagcggaaggtgctcagctgggcttgtcaggagtctcatctgtcagtggattgacaagaaacagagcaaaatgattcctccaatgttgatgagcctgcccgtgggatctggaaagctaataacagagaaaaccaatatagacaaaggattttaaacaggattatggtcaattaagcaaattagaaaatgatacttgaaggagtatttgggacgcagtagtcaaaaacaccaggaagacatgaggaattgccctaagactctagactacagcactatgtagataactaacaccagactattaattatatcattgaaaaaataaaatttacagtaaattacaaactgtttaccaaaggttatgaaaatcttgtagacttgttttaattcagacaaatgttttcttctcattgtcagctgttctctggcgcatttattttggattgaaccatctggggaagaggcgtggcctctcctgactggaaggctctggggcccaggcagggagaatgaggtctcagaatgacttccttgagagtcctgttcccctttcatcaatgcacagatacagaagacccctccgtcctggagcacctgccatgagcatcagcctcctgtgctgtgcagcctttcctctcctgtgggcaggtgggtcccggacagggccccttgcatagatttcaaagcccagcccctttccattggggctgcagcatcagctgtttccttctctgcaggtccagtgaatgctggtgtcactcagaccccaaaattccgcatcctgaagataggacagagcatgacactgcagtgtacccaggatatgaaccataactacatgtactggtatcgacaagacccaggcatggggctgaagctgatttattattcagttggtgctggtatcactgataaaggagaagtcccgaatggctacaacgtctccagatcaaccacagaggatttcccgctcaggctggagttggctgctccctcccagacatctgtgtacttctgtgccagcagttactccacagcgctacaagaccatctcctctctgcacataaaggcagggtggctctgcccttcctcccccacccaagactcagggatgacctgggcagagttttctgcaatggggaccttggaaccccgagtggccctaagtggcccggacagtatgagcctcagtctgtgccgggtgctcctgcagccatctcagccaggcctggactggtcccaggtcctcagatgtctcctttgttgctctctctggtctatcctctgagctctccttttggggttgggccagggcttccccagctcctacttttctactcatcatcctgactccgaggcccccaggatgaaacaggatttgtatttcagatccatctaggctgtcctctccctggtgagcatgctgcttcctctatctagagttttcccctcccccaccccacccatggtctgtcctgtggcctatctttcccatctgggcagtcaccttccatcccccgcctccccgcccctctctactgcagccatggggggagcacctcttctgagactccttccttcccatcacagagacttcaaaggccatttcctctgccctggatggagacttcctttctctagtggccagctcctacctgtgcttcagatctcagaatgatctgccctcccgcaggaagcaatccctcaccgcccagctgagatcaattttcctctcataagctctcatagaatcatatgtctcttagtaacccttaggacaattaggctttctcagatacttgtctgatgatttttgtgctctacccaattttttttttttttctgagacagtctcactctgtcaccaggctggagtgcagtggcatgatttccgcttactgcaacctctgactctgattccagtgattctcctgcctcagtctcccgagtagctgggattacaggcatgtgccaccatgctcagctaattcttttttgtatttttagtagagatgcggtttcaccatgttggccaggatggtctcgatctcctgatctcatgaaccacctgcctcggtctccgaaagtgctgggattacaggcgtgagtcaccgtgcccggcctctccactcaatttttgagcccatgagagctaaggctgtgcctgctgcattaacaacatcagtgcctggcgtgtggggatacccatttcacagagaatggatgagtgaacgagaggctgaatgagtgatgagtgggtggacgaaccaatagtaggaacacactacatctactgtaaactggcagaggtctagcattaagtacaagaaagcccacccctttgattgctgggctcaggtcgatcttggaaattgatggggaatcactatcatggcggccacatctggctcaaggctttctcttgtggctgcagtacctgacctcctccaggtctctgtgctctctttcagggtctttccccacaacaaatctagacagatcagagatccacttctagaattccatccttaaaggttgttccttgaaaccacttctggtaagaaaatctccattaggtttgcatcaataaaacagggccactacaagtttgagagtgtaacagatttatgatcagaattagactttatgcatatgtgggaggagctgaggaagacaaggtctggaggagagaagtcagaaggtgagggagccagtcagtagtcagggctcctgaagctctgggcaggacaggctagagtggcagggacatgagaggatcagagcataccaggacatgcagtgggaccttgagccgggagcacaggaaaaggccaaggaaacctgcttctggggaagctgttccttgtctatgggggccacccctgcaggtgcactgccaaacactgtgggcagcctggctgctgttggccaacatttgggaagatgaactggacacagggtgcagaaggaacaggacttccaaggtctgttggatgcctctgtatctgctggtcactgactctcactgtctgaccacaatgacttgccaattgttatagtgactgttttatatctgtcttctaaattttaccaaatgtatccttgaccatctctaaccagaatgataacagaaatggcattctgggaaagtcagactcttcatttgcaaagttgacttaacacaatccagcacaggatggattctcccagattaaggcatcagatcacacaactgtctcgacctgccacggtccatggactcctctccgggggacacctgtgctgcccaggtgaatgtggacacaatttgtatgtagatgttccagacgctggtgactaacttttcttttaatactgtgtctgaagtctctctcacccagagggtctatatatgtatgagtatatatgtatttataaatatgtatgtgtaatttctccttagaagaaaatgtcatgatgactacatggcttaatggcatttatttatgaaagagctttattaaaaataattagaaaatttgaattctattctgaatttttccttgggagtgtcctgagagcatttttgaccctaccgacttttgtcatgtgtgtatttggcagcctagagtgcagcagttattggcgccatacattagggagttagactggagatggctgcaaaatgactgactcttagtgttattcactctcactctgggcctcactggaatgtcacagactaccatcgaacaaatggattcccagtatgaagaatattaggagatagcaatgaggaaacatgagcacaagcaacaaacatttgaagtgcaaacctgaagactcgaaatgttggcattataagatatgaaagtttggtgagctacatttaaatgaacatgacggggaactgaaactaggaaaaagacaatgcctgaaaccatcaactttcataacaattgtcaaaaaatatatctaggaatgcctcatacaatcactgaaaacaaaatggaaagtcaaacagttgattagctcctcctacagagatttttagtgatttcaaagatggatctgcaggagtgatctagaatgcagcacggaaaatgaaaagtgaaatatgaaagaagttagagaacagggaagaaaaaaatggatgtttcccatatattagaatatgcatatttttcataatttcccattttttgttgcatatgattgaattttcagacagataaaataggtagaatgttatgaggtgatatttatgagatgttagctgagaagttttttgaggtgtttaaggacctaaattcagagtttccagaatcacaatgaatctcaaataaggcagtcaagtcataagcaaattgtagaacatgacggacaaagagaagattttgaaagccgtcagaaagaaaagacaaatacgtcccataggaatagatggagaacaacagtaagttaagacagtggtaaaaataaccattagctcaattatcattctccttcatttaaggtaagattgattaaaaaaaataacttttagaaggggaacatgaaaaatgactgctgtgagtttgctatcaaggtttcttttctgaattacagttaagaaaggtgggaaatgatcccagaagaaaggcatgagggcagttcgtgaggtaacccaagtgatggggctgcccgttgggcacgtgtgactgagggaatggaggaggctggggcataaatggggatggcagaggggaccctgaattgcaggatagacaatgagctaatgccttggtgccttgttttggggatgctgttggcacatcctacaagacatgcccagcagacagaggagtggctgtaggatgagaagatgaactcagagatgcagtgtgagcctctggctccagacagcacgggagcccaaagcaatgagccaggcattgatgttgttaaaaaggagcttataaatatttaaagtgtgttctaatataaatactgtgaccctgacatcctggggattgagagaggaagtgatgttactgtgggaactgccctgtggagacaaggacattcctcgtcctctgctcctgctcacagtgacactgatctggtaaagcccccatcctggcctgaccctgccatgggcaccaggctcctctgctgggtggtcctgggtttcctagggacaggtgagtcctcagaacattaagtagttttattttttctctgtgtgtaggtgtgtgtgtgtttgtgtgtgtgtgtgtgcgatgactacagatgttttccttattctgttgccaaattctatttccacagatcacacaggtgctggagtctcccagtccccaaggtacgaagtcacacagaggggacaggatgtagctcccaggtgtgatccaatttcgggtcaggtaaccctttattggtaccgacagaccctggggcagggccaagagtttctgacttccttccaggatgaaactcaacaagataaatcagggctgctcagtgatcaattctccacagagaggtctgaggatctttctccacctgaagatccagcgcacagagcaagggcgactcggctgtgtatctctgtgccagaagcttagcacagcgtggcacagtcgcgtccttcctgctcacaaacctcatccttctctctccttgcacctcctagagacccttaatagaggcctatctttgatcctcacttttcgtgggaaataagtagatttggacatcggctgtcctttgggtagaaagagaccacagattcattcctgaaacacagtgactgcaaatgtaggtggtgaaaacaatcacgtcccactgccctctaggagtgcttggagccagctcactgctccaaacggagtgggtgtcttagcattggccttcagggcagacatgcatcttctataggtcttggaggctgctgtgttacccacatatatgaggttgtcaagggcaggaaacatgctcttctcctgcatattttggggcatctggaaggtctgaggctacatccccaggaatatctttcttctaaagcctcttctattcctgtcaccttggaaatttttgcaacaaaatatcgaacctctcttcctgtttaaagtaaaggtctttgcaactttcgtggtctttacttgataaatacaatcatggtaacaataagacttcatttcttctgcctactttaagccacttgtatcctttattttatttccatttgccattgctactgtcctgatagacagaagcatgcattcaccactgctgcctgttcacatcgattccctcaggaaatctgatttttagactctgagtgttttcattgttgtccaactcatttgatttgaaataatgttaccgaggcctttaactcaagaagtgttttatttataatattgaatctattcctttttattttatttttcataatagatagtactatatagtacttgttataaatagaagtacaatgattatattgcaatagaatcttccacctatctgtgggtgctgctgcagtgtgtatctgtgaaagcgaatgcactggtcagagctgatgtgattatggatcgtgggtttctgggagtccttggcgacagaccacttctccaagtgtgggactcagtgtcccagatgcaaccatgatagaggtgccctgagtctttcatagctaggaggggcatcatagtccttccaaattcactgatcagaaattgtggtgtggtacagataccaaatttctttctccagagaatgatggtcactggcagggagttgctcttgacccattttttcttgtgtcgtcatcaaatccctccttgctcaggtgccctgtgtctcctgggactgagtaagtccagagcacagatgggaattccctgtcttcctagaccctttgtctaactgctgccactttcctccatgtgactcctgagatagctggtcctaacagtggacaagctctgacactgaggctgaagaaaacacagtctatagttgtcaacggcgctgcaagaacatgtagcaaaaacgagcagggcttccaatttatactgagaatgaacatgcaagaggagcaaagggtagaaggtactaatgaacaaatagcaaggaatgcagtttctgttctaatgaagtcattctgttgtcttaagttaagtaggagaaaactttcacagtaattacatcaagtcaaaggctagcggctccccaaccaaccaacatagctatttgctctgtgatcttggcagcttcagaggactcagaaatcctttctctgcacaaacatccctttgtccattccaagatccaggatcacacactgatcctatcatgaaaacaatgaggtgtgctatagttgctgtggcctcattttagtatgttgagtaggaagcattgacgaactttgaaagctttgctcttgagtctagggatgtgctggagccagcttgtatgagtcagaagaatcaaataggcatacttttcccagctccctgttcagtgaagccatgctgggagcttgaaatctgccatggtgggtatgttggtacaacagaaattagcaaatgctaccagccatgcccccaccttcacagacacccagtttatcagcacatcactggagtattttctgatgtccctgttatgccatgtcttttagggacaaaagggctcagaatttatgtctcctctactctgttcttagaagccatcatctaagggggccttgattgctcccatttctatccagctcccaaattctcttgctctgtagctctgtgtctcctgcaagcacgccagtctggaacatgacaactattttgaatgtaactaaaggtatcactgaaccagttcattatttacaaattatctttccttgcatggaatattcagatgctggagtcattgggaacagagatggccaagcagcaactctgggttgtgaaacacttacagccccgctattcttctgtggcaacgagagaccctgtaaaaaggacaattttgctttggagactaagcagctccccaccagtcaggaatgactctgcttttactttaggctgagaggtcagaagggtcacaccctcaatattctcctctccaagacggagtgtggccactctccatctcagtccctggaagttgtccagagctccccgagaatccctgctctggaggcagaatcaccaaggctcatcctcaccagctccccacaggctccagcagggctttcccaccaggtgcagggcacaggaatggctctgcctgtctcttaggtagagggaggccaaacagtgatgtttgtataagagggactggggttctgggtctcctttaaagtatttgacaaaattttctttgtttttgttttattgtgccatctcaccaatgaggagagcaatcccttggtagttatattgtttttggcacttgggaaggtttttgtggttaagccacattaagaaattgtgcctttacaggaaattatgctgtacaggaaagttcagctgtaacccaaggcagtgaaagaaatagcaataattttgagagcagttacttgggtatctatgataaaggtgttaagtttcattgcctacatctaactttcagtctagtggaaatgaaaaggcacagttagggggcatgtgagcatgccatgagagagatcgatgccaattgagaagtctgtgccattccccaatactgtgggattgaaggggagggagagatgacctctccttcagactgtgctcaacaaggagggagtgggagttcatccatgggaatctgacgaggagcaaatcccaggggcctctaactcagggtgcaggagcaaatccttggagaggaaaatggtccagttcagctgtcacaggagacaggagaaagcaaagtcatctaatccacagtctcccggctgatttgcttccttatgatgctattttgtaccagcgtgtcctcatctcccgctgctcctctgcctgtttcagaatcatctcttccgtgtttggtgctcagatcagtggatgtgcattgtacaagctgatcatttcctgtagcagcccctttgctagtcttagttatatccatccttattttctgcattaggtactgctccctccaccattcattgcttattgccttgtaagaggtctcgttttatatatttcaattttactttttattaatagatatttgacttcatcttttgctgatctatacttttggggtaacattgtcatttttggaggacgatttgtttatctttagtgattcagattaaataatctctttatacttcaatgtctgtgttttcttcctattttaagccaaatattatttcctttcattcctctccttctgttactctttctttagatggtagttttaagggagaaaaagttaaactataactggacctatgtgataagtgttattcagaatgagggtgggatattaagattggtaactcaaagcaataatcagggttagaactaatgttagacttagggtttaagggaagctgctcataaaaccagcgtgatggcacttctggaatattctggcagcttcctctgcagacacttcccagcattccttgggccattacagaagaaacaatgttgaaacttcacgtattggccacaagatggcagtgtggtccactgagctcgaaagggctctggggagtctaggagagcatcctaggagggaaagggttaagaaaaattagggcttggatcctgtattatgcagatgttgcagcagctttcagttattgctaggctacctacagctatgcaagagacgggaagtccctctaatctttaatgacatctacagttgaggaattttggccggggcaaattttggtcaggggcaggtgtagaggagcaactgcctcagaggaaaagggaaaagcgaggggtgggctgtgtcctgagcccagtgcgtctctgctgcacctcatcttccctgcaggtctggccaggcaacagctttaacctgcttgagtgatctggaattctagaagttcagaagtcgtactgataacatcaccttggctgagattccattggacaccaggcatgtgttctctggaggacaaaaaatattgagaacaagctctaaaacacctaagtaaacagactacagaagaaaaatgttagtagatgcaccaaactgtgccgttagacctgatgataattgactagtagaattaccaaaaagagactataaataagtctccactaagtatttgtgttattgagagcagtgtttaagtcttctcagggtagattaaagaaggaattcagctattatcatgactttggcttggatgaaaatccatgaagtcctcaattgattttcttgtaaaatattacagaataatattgagcaaacattttatttttctccagcctgtatccctccttagcactaacaggtaaagcgaatacctagaggcaacgtttctttagttgggatccattaactgcaggactgggaggtccagagctgggcttcacagggagtgcaaaccccacgtgcagggaaccccgtgtgtctgtgctgtgcccaactcccctctgtgaggctgtcaaagggagagggccgggtcacccgggaaccccactcacaaagaggggagcaggctgcttgctgggcaaaaaaatcacttcaccaattggccaatctgttgaaagccaaaatgaaaggaaagtctgaatgtgagagtgatgaatgcccaattttccaagttatgaaatgtatagcagctcatggttgtcagaatgatttcaacagcatataaagatattgtaaacagcttttgtttgtctatagctttccttgatattgatcctcagttgtttttcagcccacgcatcagttgagcttattttgataccaaattttaaagttgccacttcagtcaccaagcacttctcacattctccataacttacagatatgtgtgctcctgtcttttcttatttttgtgtgattcatttttaaattgggctgtacagaatacaagcatacatttgtaaatgactcccatattttatgcaattaactgtttactttttagtaacaattttatttaaggtttaactaatagagataaaaacagaaatattaatacaaggacaacatggtaaattttgacaaatgcatatgccagagcaacggtaactgaaatgattataaaaaaatttccgtcatgcaggaaagtgtcgtcatgctccgttccaatcaatttctatcccacagataaaaacttttcttagttatttatttattttgagacagtctcactctgtcgcccaggctggagcacagtgctgtgatctcagctcactgcaagctctgcctcccgggttcatgccactctgctgcctcagcctccagagtagctgggactacaggcgcccgccaccatgcccggctaatttttgtatttttaatagagacggggtttcaccgtgttagcctggatggtctcgatctcctgacctcgtgatccacccacctcggactcccaaagttctgggattacaggcatgagccacggcgccaggccaaaacttttcttatttttatcaccattgactagcttggtctattcctgcactccgtataaatggaatcatataacatttttattgagttattttcctccaaaattagtatttctgaagtgtattcatattgttgtatcagcaggtcattctttattatgactaatattccactgtgtaaatataccacaacttgtttatccatgctcccgttgatggatatccatgttactcctgtcttcaactattatgaataaaattgttgtgaatattcttgtggaattctttcttgtggatatatggattcttttttttttattttcttttaggtatagacttaagagtggaaatactgactcacagtgtagatgtgtgtgctatgcttgcgtgtccccacaaaagctcatgttgaaatttgtcaatgtaatggtattgggaggtgggacagttatcactaggtcatcagggatctgccctcagaaacagatcaacgccctattgtgggagtgaataagttgtcttgggaatggtcttctgataaaaagtatgaattcagccactttctctgtcttgggtgcttgcttccccttctttctgccttggataatagcaggaggccctcagcagttatggccctttgatcttggacttctcggtctccagatctataagccaaataaatcccttgtctttataaattacccagtctgtggtatttctctacagcagtaggaaagaaattgaaagaaaacatggtgctgagagtggcgctgttgctacaacaaggacctgaaaatgtagaaacagctttggttaatggcaaatgggtaatggatagaggttggaagaattcggagaagcagacaagcaaaagcctagattgctgaaatagatcattaagggtaattctggtgaaggctcagggggaaatgaggaacaagatatcggaaatcaaagtaaatgctatccttgttgtaggtagcaaaaaccttggaaaaattgtgtcctgttctaggactttctggaataaaaatattatgagctattagctaggatatctactgaaggaaatatctaagcagctaagcattcaggctattgtggactactttcaggcaccaggaaatttaacccagcaagaaaggagccaagggaatagattttgcaaaccagcacagatggtgacactacctccctctgctgtcctgtctccaataagacaaactcgctctggagttagagaaaagaggagccagttaacataatacactggggtcagcttctgaaggcagggtggatctgaagggaataacataaactgtccagagcactacgtataggatgaccttgagggtgctgagtcccaagctggctaggtctgtgctatgagctgagaaggccctagaattatttctggggaatctgaactcttgataatttacagacaacacaggtctgctttgattctgatcagatggactaaatcttggggactctgcaccgctggccactcaggaaatgggttgggaatgttgcctgagacaggaaaatatgataagaaacatggtgtgaatctagcatcagaaagatgatgtgaggacagcaaggaagaactgcaacttgaggtttaatcacaggctcctcatcctcccctgatgggcaggtgtgtgagctccaggatggagtaccacagcactaggtgggagaagggtgatagggtggtggggctgcctgtgagctggggcagtgtaggtagaggagcaactgtatcaccacagaagcttctgccttcacacattcctccagctctgcaggacaggttgagtccagggtccgtagtgcgctagacttaaggaaggctgcatggggaggacacaggacagtgacatcacaggatacccctcccatcaggaaaatcaaggctcagaactcactgggttcttccccaggaggaccaagccctgaatcaggtgcagtgctgcctgccccactgtgccatgggccctgggctcctctgctgggtgctgctttgtctcctgggagcaggtgagtcctgggcacaggacagcagccccattctcagcttttccacccgtgtcctccactttaccatggagaagacctccaggctgtctcctgagctcatcctccatctgcttttcccacaggcccagtggacgctggagtcacccaaagtcccacacacctgatcaaaacgagaggacagcaagtgactctgagatgctctcctatctctgggcacaagagtgtgtcctggtaccaacaggtcctgggtcaggggccccagtttatctttcagtattatgagaaagaagagagaggaagaggaaacttccctgatcgattctcagctcgccagttccctaactatagctctgagctgaatgtgaacgccttgttgctgggggactcggccctgtatctctgtgccagcagcttggcacagcccggcagaatcactgacattctgtatataaacttcctgccgtaactttgacttgagagctgcaggccccacccaggtttcactccttcaagggaagcttttagttgcttggaaggcatgtcttgtgtcctactgagggcagacctttcccaaccaatagagcccaggtttcctgtgccctgagtgtgcctgcttctgtgctgcatcttcttgcagcttgtcccttcctgggtaacttcagtataagagtgactgctgagcgcttggtgtgtgctagatttttgtatatgttacatatcttaaagcttttccacaaccttgcaaatcaaacattctcatccttcctttacagatgggaggctcagggacattgagtcattttccccggtgtctcctggcttgtaaggatcagaagtgggaaacaaactagtccatccattttccacctacccccctgtttcatcaccaccttctgtatcctgttcagtaaaccagagccctcacactgccctctagtgaccagcagggccgcagcagaggctcagatgtcttcagggggttattactatggcctcctaattagcaattttgaggaatgttaaatttcacactttttaaaaaatcatttatatgcattccctttatctttcccatgtctgtagcttacattttcatttttatggtgttttttgatgtacaagagtttaatttaatgccacaaaaatgaaaaacaattttgtttgtgtgtagacaaaaacttctttctcatataaatgtctaaacatatttttcttaatttattctagtaaaatttaagtttggcttttctccattaagaagaaatgtacctgaaatatatctcacgtcagaaataacatagagacctaggaatgggagggaagcacatatgttcagtgaagaagcaacagcctgtcaaaaagatcccaaaatggacaccctgcgctgacggtggagaggtagctggagggtaaatgatcacgaactttatcaagctgttgttgttagaagagggacagccaggagcagagaccacatgggtgaaggtttatgacttgactctaggttgaaggttgcagcaggtagagggcggaattgcaggcagagggcagagtcactggctggcaggggcagtggcatcaccagtgactctactgacatccaggaattatgtccccaacacacaaagtgaaaaaactcccaacaatctgcacatttttccctggccctgctctggccaccagactcctcagtggtgtggccttttgcctcctgggggcaggtgagatctttaaagacttttccttggctcaccacatcctagcctaagcctttacatcaggtctgcattattggggtccctccttggtcactcaacttccttctatcatagacttcacagatgctggaacaacctgatcccaagataccagagaacaaaggcaggacgcgaagtgacatggagatgcctgagactgccatccatgaatacaggtgcagatgttaataggagccgaagctggtgcacagctgatctgtcccagcccacactacagagaaatccctgaatgtctttgacttcctctcaaagccaaatatgtggccttggtgtcagacagtctctcccagacctctgtgccctcttgcaccaggctttaccccacagccaccttcctctgcacacaaagttcagtggaagatataggtggccttgtctttacgagatcgtgatctgggcagtggaaaacattgtcccataggagtctccccaacactgcccaggctggggccttcagagctcggagcagctctgtgcatatgaaactctgccttgtgttgagcttctctgccaggccagtctcagctggacaaaggaacgcacatcaccatgatgtgagtagatgcagcctctcttccaggcccctcctgcagctctggcctcagaagtcctctttctcaattgctctcaggaaggaaagttcatttgaaattgtatatttgcagacagcattgacaacacaggtctacgtatgtccaatcccatcttccatttgtaacaaatacaaacactgtggtgtgcttcttttcacccctcttttctgtgttcatgcacacctttctacccaagtacacctacagaaattgggttcacctgtacactttactggccacatgcatactcttttctgttaatataccctggtcttattgttccagattggtcgatatagatctaacttgctcctattagctgcttcatattgcataatgagggtagacaggtacattcatgctctattgtctgagtcctaaattctgccaaatcttttctaaagtgactgaatgacctctttatgcttccaagttctcctcaccccagcacccagttgatgaatgcagcttttccatcactcataatcctagcaggtgtgagagctttatcagtttctcctgcatgaggagacagggagagataaaaggatagatgtttatcgaacctaccagagcctacacagtatctcagttcatcctcataaagcatggagaggaatgtgcgtcttgttttatagacgagtctagatgtggctagagtccaggaaggttaatgaatggcattgcccatggtctcagagctaataaatggtggagccagatggaggacagttggcttgcctctgtgtagaactgatagaggggtcactggagtttgagggaggtgaagtctagaaccatctggcgttgtcttcggatcagacgccagggggcagtagagtctgtgtaccctacagcactgaaggtaaaagtatcatggtgttggcagtggggaggtactagagtgggtatgtggttagtggccaggaaccagaagatctgaactttgaaaaaatttttcccatcacaagacgtagcagagacactgatgtggataatctaggccagagaactgtgtgacgagctgttcttaaaatgagggagggaggagaagcaactaagggtcacttcctctacatgaaatggagaggaaaacaatgttaactagaatctcatctgattttagtcagttttgctttgtaagtagttgcaaggtgggacaatttatttttgacattaagtaaacatctatacggcttctttaccttatgaagtctggtggtgaaggcaaaaatggtacggccaatggagtcacagtttgtttaataaataactcagagttcaaatggagactctcatgggccagaaattggtaaatgttcctgcattctaaaattaggaggatcttattttctttgaatcaacagagaaggaagcacaggcagtggggagggacagtagggaactcggcagagtggccacagaatgtggaagacaaaggacatgtaataccaaattctaagctgtgaagttgtgatgcaaccctcctccttctcctaatgtttttcaggtctcagcacagatgcacacctgagggagtaacttctttggaaatgaaggacaaatagctgtgtaataataagtccaccttacaaagcacaactggaaatggaaacaagattatttctaaggccttttctactctaagagtaacttagtagcaagctgagaggtgaggatggggggatgttcatccacacgcaatgagtaccatgaggctctaccatgaagcatatagtcctcagtgtgaatcagagccctaagaagaataatgccctttacattgctttgccctctgccatcctaaacccatcccacccataattaagcagccatggaaatgaagggagccagaaggaatcaaaccctgctgcttggttcagtagacagagggacctgggggcagggtgttggctgggtctaggagaagatgatgagctcagaaaatagacaaggagaaaccccaggggaaagctt

SEQ ID NO: 95 - DNA, 212716 bp, Homo sapiens
gaattccaaaagtggcagagattggagaccctgcagtagtggatgcagagccagggaagtagtggtgcatcctggactcaacagtgttcaatggacaaggaagctgaagctcctcaggtgggtgtggggagatggctgggctagggctgtcatgaagcaatctgtccagtggagaagggactctagtgatgagaggtcgtggatggacttccaagagtggaaactaagtttgtagtggggagaggtcaaaataggtcatgcagattgcatctcacctcatgttagatgctgcacaaggggcctctgaaaaactcactaatgtgcccatgggaagaaatcagcactggggtcctctcacactgagggtacctgcggatgccttgccatagcatccatcacatgggaacctttgtcttttcctttaatttccatctggctgtgaaggatacccagaaacagtcaaggaagaggagaaggagaatatggaagtgtaaaagcatagaccgtaatccccttcctcactgctggaggtggtctctgcggaaggagaaaacttgacatggatgtgaaaatgacataccgatttagatgatacaaattcttgaaaacttccaaatgaccagaaagtgatgaggtctgttgacgggataagaaaagaatttcaactcagcattgaggaagaggggctaagattaagaaaaaatgaaaagcttgagaatgctgaaaagacacacactgcctcatttcacattgctcttacctgttagaatgatgggtgaacattcatccttaactttgtaatgctttataaatctcttattccaaggaaaagtggagaatggcttggagtacaaaagttagatctgggccccaaaggacgtttgaggttttctcaccttagccaatctctggtggcttcagagaaggtggctttggaaattttttactatgtaattgagaaaagtttggctcaagagaagaagtaaaggggtctgtacaacctatgggtcttgttacttaaaaacaacttcttatatttgcacaataatccatagtttgcaaagggcctcacataaatgttttattttgttccactcctgctgtgaggcagagagggaagaaatctttacactttttttctcagaggcagaaaggaagacttagaaaggttaaatgacttcttcaagaacacagagtcttaaaacatagtagagcttggccttctgattcacttcctattacccgtctgcttcagggtcccatctcctgaggaaagtccatctttgccatgatgtgatgaactaaaataaaataaacaaaaacccacttctagaaccaaataagtcttgtaaaagagtcctgatattattcctatctatttacgtgacctggatcaacttgcttgaattatctgagccttatttaattccttcattggtaaaatggaaggattgagagagtgcctaggaaaatatctagtgtagcaagaacccataatttggtattctttttggcatatcaaaacatcttgtaaccttgaatatatacaattttcatttgtcaattatacctcaataaagctggaagaaaaaaaaagagctgactactctattccttactgctaatacaccaagatgatacgtctggcttcctaggtcctctctcccaaattcttccctttttgataataattttaaaatgaacaataaatagataagttgtggtgaggttgccaatgtgttagaaacattgagtggaacttacgaaaaggaaccccttatgaaagttgtaagattcaaaatggagtcacttgtgccaaaccctggcaaaatagagttggggaaggtcctgaagagagggctctcacacaatttgtctgataacaggaactatcacaggacatttttccaaactgcagctttttacatgagtcacgccaagacagctagctgcctacacaagaatacttgcctgacacactgtctcacaaacctaatccctgcaagggagctacagtaacttccaggttacaaatcccacctagcaactatagactgttgccaatcacaactcgccagctcttgtaagacactgctagtgccaatgaactttctttcaaaacgacttgcataaccttctctttccccaataaaactctaatgtttttctttgttctctggatatagcagaggccaccctgttgtgcctgtatcccaaattgcagttctgttttcacattttaattccaaataaaagttctgtgctttgggaacatctctacattttttcttggaagttgacaccctttaactctgcctttgctttccttcttaccctcttttgctgggtggaaatgtggagtcagacagtagcaatagtgagttggctctagatgcccacaacaccttggagggggagctggagagcagctctgcatgcagaaagtaggtgtgggcggagtagctctgtcatgtgcctccacacaggagtgaagcttgacatggaacatggtcaccatatgccatttgcgcctccctctaattcaatgacttctcaaaaaaaccaccattttaatatatttattattcatttttaaatttccttttacttaaattactaatgcattggcagtttttgtagatgaagattcttatttattgactgtctacaaaaataaaattgtaatctttcttaataagaggaaaacccaaatttttgagggtgagctatgcaaagagcctcttcagggtgcatgtgtttggacatagaggtcgcagtagagggagaattgacagaccttgtggtcctaaatcttcccctgggaggttaattgctccttagtggtcacttactgataaatggcacctccatatgctgacatcaggcagaagtggagtgctgatgcaggacaggcaagcccccaaattggggctcagccagacagggttcttggctttccccaggaaagaattcaagggcaagtaggtggtgctaaacagaaacttttactgaagtggcagtgcatagcagcagcagaggcagtgcttcctgtggaacagggctatgctgtaggcagtgcacccagagtagcagctcagaggcagttctgcagcctcattaatacctacttttaatcacatgtaaattaaggagcaggttattcagaaatttctagaaaaggggtggtaacttccaggtcattgtcatggaaagggttgtaacttctggctgttaccatggcaatgccatggcaatggtaaactgggaagaggtcgagtgacatggcattggtggatgtgtctcagggagagatgcttttgcctcttcactatttcagctagtcttcaaactggtctggagttcaagccttacctcagtgctgcttccaatactctgtccaatactgattgttatctttctcttattttagagtgcagttgagataaggtggaaccactgaatgttttaggaaagcatactagacaggaaacaagagtataagaattatgatcattttctctgtaaggtaaaatccatcctttcttcctgagttctcagagaaaggatgtctgagctatgtctgcctgtgaattagtccatttttctctttcttaggtcctaactttcttcttcctttccagagggcagtcccaacaagacgacaattagttatttgaataaaagggcagtttcttaaatctactaaagatttaatctactaaatttaatctactgaagaccctgtgctaaacattttaattctataggcatgtgaaatgacagaaaaacaaaactgttgttcagagagttaagcaactggtctgatactgtttatcaggttaagtgttggagaaacgattacaatgagatctgcctgcctgtaaatagcattataatttcaaacttcccctgaggaagaaccttggggttcctaaaagctgctttaggatgagggaaggtcaaactcttccttcccagttgtatcagaattgctttgttttttgtgttttctcttctgtatttttgcataagattttatttgaagaaagggcatcattgcttaaaaaaattgaggaaaaccaattctgaacaatgccatactttcgataatttctgctgtatgagttagacagtattttgtgggctagctcaggaacctaaccaacatgcattctaagtaggaagcatattacctataaatcagctatcagaacacaatctccatgtaatctaaatactttatgtcaggatacaaagatggccaaattgaagaaatccttaaagcaaatgttgggagatgaggagaagtgaatgaaagtctcttcctcatgatggcgggagatacctggttctcaggagagggaagactacagagcttgtctgggacttaggctgccttggcctctaggacttgccccatctgttgtgcaaaggatagactgaagaaacagctctactgtttttgaataacctctttactacgacctgttactctcctgtcatggcaacccagagaagcatgggatttttttttccattacatgatgttttccatttaatgggattataatatgaactatgcatttaaaggtagtattctccattttttccaagtctttgtttttttatttttattcatttatttaaaaatacaatttcaatttcattttagattcagggtgtgcatgtgcaggcttgttaccttcgtatatcatgtgatgctgaggtttggtgtatgactgatcccaccacacaagtagtgagcatagtacccaacagttttccaaatctcatccccctccttccctccccactctagcagtccccattgtttgttgttgccatctttaggcccatgaatagctaatgtttagctcccacttataagtgtgaacatgtggcatttgcttttctgttcctgcattaatttgtttagaattattgccaccagcttcatccatgctgctgcagaggacatgattacatcctttttatggcttagtattccacggtgtatatgtaccaattttctttataacaaggaatttttgaacttgtcatttgtggttgtgtagggaattaatcacattgtatggggaatgatgtcttaggcaaaagtcagcttgatagctatcatttacattattttgtggcattgtactaaatgtattacatgtgttatctaagtaaatatgctgaatacaagtccaggaatcttttcacttgattggacttggcttttacggaattttcccagacataagggaaaactttgtggcatagcatttaataatttctggctctgccatcagatgacaagggttcaaatctcacctctgctacttaggaacttgccatcttgtgataattatttaacttatataagcttcaatgtcctcatttataagatggaaataatgtagtatttctttatatttctagtagtactttttgttttttttgatacagagtttcgctctgtcacccaggctagagtgcagtggcaccatctcggctcactgtagcctctgtctccaaggttcaagcgcttctcctgcctcagcctcccgagtaactgggattacaggcatgcgccacacatccaactaatttttgtatttttagtagagatggggtttcaccaggttggacaggctggtctcgaactcctgacctcagatgatctgcctgcctcggcctcccaaagtgctgggattacaggcatgagccgccgcgcccggccagcagcttgctacttctgagtcctgagttcagctggctcagacgccagatcccaatacatatagcagactccattggacctgcactaagagcaccacctgtaggggctgttgcttcaggtggacactttttttcctttcttgcctcagttcccacatctggaggatgaggcaaacatctgaactacaataaagtacatggaaatgcattttcagtctgtaaaatgctgcacaaaggtttactattatttattattgttattctataattccctgagtgttctgatgtctattgcgggttgttttttaagttttgtttttgtttttgttttttttgtcttcctttttcttccccttggatcttctggaagcagagaagtttctctttagtgctggtgaaacaggagagttccctgattcccccctgcaggacatgtgacaagggtgtggcctgcttggtcgccctgcagctcagccccctgtagggggagcatgcagacaggcaggcgtggaggccagcatgagcgcttctgggctccggccccagggcagtgtctagggaccggtgtctgagactcccgaagcccaagtggacgtgtcttactaagctcttttagatattctgtctgcagatggcttgtgtgttaatcagcttagtggatcctctgccttatcccaagggcagtgggccagagtgacaaccttctgcatcccaagtccttgcccagtgtattggaagaatcagatcacatgtgggctcgaaggatgagtgcaagattttattgagtggtggaggtaaacgttttctctgtttcagtcagtcaacaaccgcatgtaattacttaattttaatacaaaactaggatcagagggtaggagctgcggtgtgaagagaactaagagccccttcaaatatatgggaatctaggttttctggagagctaggtactctgctaaaaagaaataaggaagaaataagaataagagatgaggaaggggggctgtgaccacaagagataaataagattatctctagccaatgactctcccatagtcagaggacgcctaaaagcagagttgaatgttgactctcagtctgctgaatacaaatccagggatcttttcacttgattggacttgatttttatggaattttcccaggcataagggaaaactctgtggcatagcatctcatgagatgaatggggagccagagaggggggatggagagggaaggtggtcttcccctgagttgggccacccatgggtgggagaaagactctcctccaaccgcccccagctgaactcccctagggatccagacctccttcttctctctttctctgcctcttgttctgtcattgctgttctgctggttccaacattcagcagcttgcttgcatgtgcccactaaggtctacggtttatatgggggcaggatggggggcatggcgggccaaaaggcaatttttagggtacaaaaacagaattgcctgtcctcacttagggccatgggtcttcagacttgagggtggggccttttccagggaaccaccctcttctacccagaatttccccctcctgtctgtatcactggtgctttataataaggctgctctgagtccttttttcaaattgaagttttgtgagggaaagctatctccagaggtgtctctagtgtgtctcaaactgtgattctgggtaaaattggctcttatttgagctggaagaaaatgtttcactgctaaattaaataatgctcatctttcctcactttataaaatagttaatggatacagttatcccaattttatgttatttttcaatgattttttttcttaaacctcttatgtttgctgctatttatttgttgccttgtagaagctctagctaagcacaaaatgtatgaacaaataacaggcgggaaagattttgaaacagtcagtagggtttctattgactgtattggtgtggttgaccattactttatatggcaaaactcacattttatacaagtaaaattttctttggtttgtgtgattaaattgaacatagtgtttcatcatgttctttttttttgagacagagtctcgctctgttgcccaggcaggagtgcagtggtgcaatctcagctcactgaaacctctgcctcccgggttcaagcaattctcctgcctcggcctcctgagtagctaggattacaggcatggctaatttttgtgtttttactagagacggggtttcaccatgttggtcaggctggtctcgaactcctgaccttgcaatccacctgccttggcctcccagagtgctgggattacaggcgagtaatcctgtatgattataccgccaccattcccggccatcatattcttctaagaacactgttatttgatggtgatccacagaataaatgtgaacattattgctgagagagactttggcttgtctcctgctctggcagtgagatgttgagttttacagtgtttttccaaagcagacttgtgtccagcctcagctgaggtgtacacaggatgctaattgtccctcaacttgtctgcacatcgttctacttatactcacttatgttttgtcaaaatatgatattaatattaaaatatttgttgaaataagttacaaacattttataatctatacaaataattcacatttgaagtagaatattattaagatataacatcttggtatttttcaatgtattctatttaacattcaatttttaatattcaaattattatcattcactactcaatctaaccccgtttataaagttgtataattttacaactgcagggaatattatggatgactttatacaactacttaattttactgctgtggaaagtgaggttcatagtgattaaatgattaagcaatttgcaaaagtattatggctttgtagtttattgatctttccaccacatggtccccagctctgtttaaaaatatttctgagaacttaaagaagtcagctcctcctctgcaccaggcactgacctgttgccaagagactcttgtccaagccaagtagtggtggccaagagagtcttgtccttggagaatatacattctattagggtaggctatcaataaataggtgaacaattgcataatgatgagatttcaggactctgctgccagtgtgaatgtgtgcatggacactggctacccacacctccccttcactttgccatggccaccagtgtgatcatgcacacagagggcagcaggccctgccacaggtgcaaatgcaagcacagacctcggcaaccctgtccccacctatgactcactgctggcatgagcatgtgcaggaatgtcacagccccgcttctgccagtatccccctgccccagccaacatgcatgcatcctgctgtgctgtgccacggctgccagcacaacccgtcggagtgttgtggccagtggaccaggaatacctcggccccctcagcacagtaggttcctagccttgaggggccagagaagaaagctggggtcctggaaccagctccccagggttagagcacacagctcaggagtgctaagctgagtcttgggacccaaaaatcttccagaaacaaccccagggaactgaacccaccttataccacagtcaaacccccaagggcatcaaagaaaataaaagcaagtaaacaaacaaaaaatcatccaaagtatagtgccttcaaagattgaagaaacatcagcccacacagtgagaaagaaccagtgcaagacgtctggcaactcaaaaagccagagtgtcttcttacctgcaaataactgcactagttcctcagtaatggtttttcgctaggctgaaatggctgaaatgtcagaaatagaattcagaatatgattaggaatgaagaacatcaatatccaggaggaagttgaaacccaatccaaggaatctaaggtatccaataaaacaatataggagataaaagacaaaatggccatgtaaagaaataaccaaactgatctgatagagctgaaaaactcgctttgagaattgcagaataccatcacaagtactaacagcagaactgaccaagctgaggaaagagtctcagagcttgaagaatggatctccaaaatagtcagaaaaaaaggaaaaacaataaagaagagtgaacaaatcctccaagaattatgggattatataaaatatgaaatctatgactcactggtgtccctggaagagaaggagaaaaagcaagcaacttggaaagcatattgagaatattgtccatgaaaatttccccaacctcactagacaggccaacattcaaattcaggaaatgcggagaacctctgtgagatattacacaagacaacaattcccaagacacataatcatcagattctccaacgtcgaaatggaagaaaaaatgttaaaggcagctacagagaagtgacaggtaatctaccaagggaaacccatcatgctaagagcagacatttcagcagaaactctacaaaccagaagatactgggggcctatagtcaagaactcttaaagaaaagaaattccaaccaaggatttcatatccagcaaaactaagctttgtatgcaagggagaaataagttccttttcagacaagcaaatgctaaggaaattacttaccaccagactgccttacaagaggtccttagggaagcgccaaatacagaaaggaaagaccattactggccaagaagaagacttaactatctaaagtatatatacactcaacattgaagcacccagattcataaaacaactacttgcttaatgatttattctttctatgaagcacatgatgatgccatcagctgtgaatcagagatgtagggaggtggttgttggaagcttgagaaagaaggtgaaacagccatcctggaaagcagaaacattaaaagacaagggacctacttacacaaggatcaaaagctgtgttgtaagacagtttgtcacaaacgcacgagtgctgtttcttctgcaacagtcagctacatgggtacaactgaaggaaaaaaaggtaggtagaaaatttggccagaattgagatattactatgcaaatatgacagaaagagagagggagttaataaaggtaagagtgtttgtaaggaagcagttatagttctggcccatggaatctggcctgggaaagaagggaagttagtacaataaaagactgagttcaagaaactgagaggctggtatgctggacagaaccactctgtgaatatcgatatttccaaaaagacacaggaggagtggtggaagaagagacagttgattgtagtcatcaagggatgaatggtgtgacttgcagaggacattggatgacagcagcaagcagctgtgttcttagtacaagcttttcaaaggagctcgggtttgagagaaggagagaaattggagaggggagcagggaggatgtcaatctacctccacttcttacaaagagatggtagaaactttcagagagtttgttgctttctaaaggtcttttattgtggaggggtttgagagaaggtgtgggatggggttagactggggctgtgcagagcagtgtgaggatgagggccttatgatggtgagttaccccagaggattatattgtggatggtgatttagtatatggggtagtgagcaagataggaatggtactctggttggagagtaagcagtgatttcccatggcttgagggttttctagatcacattaggcagaggaaaacctcagaaaaggtgatttcaatccagttgagggttgatttatttgaggaaaagatgcttaaagatctccaggggattactttcacccaatactagatgttttaccatgtgatcattacaagagtaatacaagctattctaatttcagattagactagacattatatttttctttctggcagattataatttatgattacaacaattcctgtgacctgtatgaagacacatatttctaatttcagcttgagagaaatttagtcttttattggatgatttaagtagatgattagtcagagggaaaattggtaatatagaggacagagtgtattataagatgcaacagaaacttttctccaatatatgcccagataaaagtacaccagagtaggaacagagtttagggcatatgtggtttaaaatttccacccataaaagagtttcgtccacaccacatctttccaatctcatcagcatgtgatttatacatcctcaaaaggttgcccattaaatttttgctcattacttattttaaaaacgtttttgtcggtactgagataaattctggcttcccagaggtctacctataagctttaatttttcatgttaaaccatctctctgatactgtttcgctttttagataatggctactattttcttaccagtcatccagattaaaactccttattcctctaaaacatctgtctcatgacatgtagctaaaaaagaatatatataatatatatatttatttgaattctaccatcttgtggttatttaagtagttgtctataaaatcctatatatgtattttgcagccttaagccatgcatgttattactcgttatgccagacagcttgacagctgaaattagtccaagggtccagggctctactatagcttggagatgggaagttctctgctcagagtgaaaattggtcaggaatgcttgcttgggaaaacgtgcaggtgttgtttagaaacaacatttttctaattttttttccaggttactctttctctcccttgtttccattttttctgatttccacatttttaatactgtttttatatagatcctgtgctggtttctttgctttaattaatatttcattttcaaataagctcaaacttggagaaaagttgcaagtatagtaacaaattccagtattctctttatccatttttcccagttatctcctgtaaattacaaattgttcactatatttactttatcacttttctctttttctctcctcctttcccccctctctatctcacaaacattcgacagtttgtatacaatgtgtttcgttatcacaaaaatactttagtatgtatttcctaaaaagacaagaacgtattctcacataactacaacatcatcatccaaaccaggaaattaacatgcatacactaccaccacacaatgcacagacaccaggcacatttcaccaattgcaccaataatgtccaatataggaagcacaaacaacagcaacacaaaagaaattagtctgcgagcacaattgcatgtcgcatttaattgtttcattgttttattttgcttgttttttactcccctctattctggaactattccttggtttctttttttctttcataattttgacatttgaagattactagtcagttatttgtagaatatccctcatacttgagggttacctaatatgtcctcgtgattgcactgaggttatgcatttttgagggaaataacacaggcacgatgttgagcccatctcagtgctccctatcaggagccacacaatgtccatctgtccattatcgctgatgttctgtggggttacttggttgaggtggtgtcttccaggtttctaaagctactattttgtctcaacataaataataaatatactgtgagaagatactttgaagttatgcagcatcccatttgttagttgtggcatccattgatgattcctgcctgaatcaattattactctcaaatttgctaaacagtgattttgtatctccttattccttttgcctttgttattttgcttgggaagaacttgtctttctttgctatttatttattgagtgatgtttggtaatagccacttcctgaggcctctaaacgtgccacttctctgagatcccacatattctcatgatctagcaactaaaattctaactacaggaaatcagggggcttccaggatttgtttccactgatgtccattttgactggtcagtgcctgtgctgtggcttaaatgtgtgatgttagaatgtgattcctgttccatccaggaagtagactggtgaagaacatttgaacttctaattcaggggtcctcagtcttaatagcatattggaaatgcctggagaattcaataacctacgaatgcctgggtggtagctcatcatcaggtgatactaatatgctgtcaagattgacagccactgggttagtgtagttgagagctttcctgttcattgtcagctaactaagtagtagcagggacttagatactgatggaaaccctagcaaacagggagaagaaactaaattattcgactcatgaaggtatggagagggagggaggaagagagaaagaggagaaggagaaggaggaggagaaataagagaaaaggaagagaaagagaaggagagagaaatggagccaaatgtaatcaatggttagatttgggtaaagaatatataagaattactgcccttctttatgaatttgaaattgtatcaaaatattcttaagccactaaagaccaaagtcacagtaaacattagcccatgggtcctcttgtcctcatagaaccacagagaaaagtaaaaataaggaatacatcttttatttatcctccacatttaatatgaagttgtgagtagaggaggtgaagaagaaaaagagttacattctcatagtcactaggagagaatctgacctcagaaacccctgaaggatgagagatgacagagaggcccaagtgacagagtgttcttagaggaagttggggtatctttcttttgcagcatgtaacgcagtcaggaaacttgcatccagaacatatgatctggagaggatcctgaagtcatcgaattcaagctcccaccgcctgtaggaatgtttaaagtactttcccagcggtattcatatgcactgtctgtctaatatgtatgtaatatgaatgcataccttttaactatagaagtgcattattctctgcaggttgacaaaaatgtagtccatttcttgaggcgactggaagaggaaacattaggtggcatggagtaaggctcagaaggggacagtgtgacctcaaggagagaatggctgctgaggggcttgtaggcatgtaactgcagctctgtaagggaagagaaatgcatgtctcatttcctatttatttcagtggcacctgtttttgacctgatgtcaagcacatagacggtgctcaatgaatatgttactgataactaaatgctgagaccagcaatagagagaaaaataaaggaggtagtgggtagggcttcctttcttcctcccccagtcctccccaaggtcccttccacacacacgaggtcctgtatttcaggatgactcactctgatgcctcctcccctagctcgtgggccacgtagataatgtcagggtaccccatgcagctggagatgttattttggggatagtagaagaggaagatgaggcacatctcattaatggtgctggggcctccctggaggaaacagacaaagatggagagacaaagatacaaaggcatgcagagacaggaggacaaagcaaacagaaaatagttgaagtggttatcttaccagtgatgccattctccttttcccttaaggtagagccagctcactgccctatttgctgctctattttcattggtggacaattattgatgttattccaaaaagcattccatatatctgccctgtcctcagcttcactgccactatcctgatttgggctagactatctgcctctcaactattgtcagtcactcatctgttctaattgcaatctgacctctgtagagctaccagacaagttgtttacaatttgtcttgcatcctgccatttgcctgttctgaaacctccagtggcttccagtcactggaatagtcagtcatcactaaaccaattatttgattctatctaataaattccaacccattcattcattccatttacttacctggcaaatatttatagagttagccctgctgtcctggagatataggtgggtcaggatcacccctgcttcaaggactgtttccaactttatctacctcatcctcattccattcctttagatatcttttgccaaccaaacttcttcatgtgcaccccacgctctccttatatatggctttctcagttttttccttctccagaattccccatctctatgtgtctaaagaaggactcattcacctacgtcacatgttcagttcactgtagtaggatctcatgattctttcctgtgaatttccctagtgggttattcccgttcttcttgtatggtatatatcacttactaacttgtgatataatcatttgtagggcggtattttttcctcagttgcctgcaacaccttttgaatcccacaagcactgaaccactcctgatgcacaaaacgggggattttcttgtgatcatagaaacaatagccaactttaattgagaatctactacaagtcaggcaatgatctaggtgttttgcatgtgttaaccaactcccacaacaatcttgtgaggtagaaagtagtattaatcttatgtgaattgggaaactgagatacaaaaaagtcaaataacttgtctaaagttagaaatgtactaaatgattgtgctgatattcaaacccaggcaatgaggccccagaatctctgctcttagtcgctatagcatactatatttccatggtcttggtgggttattggcagataatgtgagaaatccctgttcctatcttagatgcatggggtgtgagaacatgaaaagccccgtgtggatgtgtgatgccattggaggaaggaaggggcttcagtgaaatcacaggggtcactgggtagccaaagccatgagtgggctctccactggggctatggtcatggtgaccatggtggggtgagaggtcacttacaaatgtcatggagtcacggtccagtgtctggtagtgacattctaccagcaattcatctccctgttcagagtgaaacatgaaggctgagagtaagacacagagggactggtacagcttgagaactttcttggttgtcagtaatgaggtatgatgctgctgcccccaactctgcctggcctccctcagactctcaccggcttgatctccactctagagggcaaatctcgagtctcctgcaggttgaagtcataggaatcgtctttacagatttttcgaagttgtgttccattcctagaggaagagaagtcgggaattcagaaataaagagaagatgaaatacagaggggtctgccaataaagatgtagcatgcgggtggggtcattctgtgagtagattatccataaaaataaacaaaacacttcatcttccacagtcttatttcagttatttctactctaaagatagttctacctcttcctttttctcaaccggacataatcgtatgctacagaataaatcactattcttaaaattcattcccacctgcagaagggagagcttcaaggtcttccctcacctgtattgcactgcttgcagagcccgtccagccaagtgggtgtgcagcaggtagccatacacctgtatgtcaggcataggagctccattcatctgtaacagggaagaggtgcacccgatttgttaaggactgtgttcttgacctgctgcttgattttccccccttggtatttgacactttcctctgatgactgacatttaccactgtaattcttattgaacctttctgacccttcttccttctgcacttcccttgttctcaaagccctgactccttcccttccttgcaaaagtcatgttagtgaatctcctgagtaccaggctgtaattattctccaagtctggggttcaggctgtgtgggcttgtggatctgaccagatctgggatgggggacaaggagagtgtgtttcctcctcaggaagggtgcgcctcccagctccacctcctcaaacttctccgtcctacacagcccataggacatgaaggactcagcgcccggggggatgaagtggatgggaaacgtgaagaagcccagctggaggacatccgtgtcgtatttgcacagctgagaagtgtagtacacgcgaatccccgaggaatcatacacacctggtgcagagaggaacagtcaatcacaggaggcaggagagtgggtcacaatgtggagagaaagaggctcaggaaagctggggtggggctttgaccacagggagtcagcacacatcccacaatgcgttcccaataccgaaaaaaacagccagccccaccagcttcccttccttaaatcctctggatgctcaccaggaaggttgttaaaattgctgtaatgaatctccagtcagatccactgagggtccaagggggtcccaatagagacgcctacgtcatctggaaactggtagctctgttggaaggagttagatttggcagcaagaagggctgggaaccagccatagggattcagggctcctggccttgttttctaattgtcatcccagacttcccctatcccctggtcttccaccagcccagtgatctcattacccaaccacatgcacccgcttagccatgtgtttaccccatcacgggactcactgtgcccccgacagccgagcccacgatgacctgtgagcaaagggagaaggcagggtcggccccatagcagtcgctgatgcctgtggggagaacgctagcattgccacaggcgtacaccaggatgtgatgcaccgttgtctcattgtggtagaccaacttaggctcaaactgggcagaaaaggagagcagagcatgatcaagaccttctacatcaaatccatattatcttccttcctgtcaaaactatacccatttccgtcttctctctgtttctctctctccctttttctctgtttttgttccccaagctaccattttcccacccagtcagtttgactctcctctcaactcccccctcctttaagccccttctggagagcagacatgaaatctagccagggacattctgccttcccttagtaacctcctcagttcactgtatctgagcatgtagccatgccttttcaaattatctgtctaaagaaaaaaagtctccacatttgccacatattgtgagatcatacctttatttatttgatcaaaattgaaatcactcaaatatgaaattgggttaccaagtttgagttcattctagctagacttctccaacctcctgacagcccctggccatatcctctccctgcctttacctcctcttgggctaagagagcacaattctggggccaggttgaggctcatactttgttctttgcaaacaattattaattcttaaccttcatcaacatgtctgttgcattgtggggcttaaataaaatagcgctgggagttacatttctgggctcaggaaatgatgtagctgcgacctctaccaagccctgcctgtccccctgttcttgcaactacttccttcttgcttcctccaagaaattttccagacctcatcctccagggttgaccacaccccctgctctgctccagcacccttccctgccttgacaatgtcccccatctggtccaccataccttgtaaatgtgatgcttctcgctcacaatagggagaggaagaaaggtgcaggcatacgtggtgtcatcctctggaatgaggaactgtggaagggtgcacagaagctgagccagatgacagtgaggctctgaaaaagtagggcaagggccaggccagggaagggggttcacattagggtcagattggcagtccttaggagacagagaagagtcagagtaatctccacccaagggatatactgaatactgggggcaagagaagggatctgggttgagtggggtgaggagaagggagctggaggctgctgggtgggatgaaggtgtcttacattagtgatctccaagtcatggatgatggtgtcctcagggacatccagatcgtcagggtggacgacttgtagcagaaagatggacttgacaaaagtacgctcccgatacagcttcagagtgtcatccaggccataggcggccagcaccctcacggtgttgctctgcggggtgccataagcattgaggagctgccacccctgagcagcactctgcatatccctgcacccaaggacctacacaaggcacttgctcatgtctacatggtggaatggaaggaacttcacactgggagtgagaactagttaagttctatttctgcctccgaggctcacttgctggtgatcttgagcaagtcacactccctctcgcatgccctctctaagcttgtgtccacatctgtaaaatgaaaggactgaattaaactcttatatcctaacactctaaaggtcagcgaaactgggcagaattcttcaaaaggagaaccctggggcaggtgggcaggaggtgaatcagtgggaggtcaccctgcggaaggcttgtggatttcagcaggtggcacaattggagcatttcctgggaaggctgagaggaatagaagtcctgggaatgatgactagctgcctgactgggggcaactacctctccagaaggaaaacctgcttgtgaattaaatgcttttctctgctctctattttaccgtaatatccaggtcatgagggtcgcaggagcggaagggcctggaaaagtgcatggtggtgtagacagcatcttccgtcaggcccagcagctcagcatcctggctcccatcctccttcagagtgtcttcctccaccaagtgctgatccttgggtccagtgaaggtcaagaagtaagaactaggagcttcaaatgtcatgctttggagcagtagctgttcctttagctcccctaggatactagagtagcagagcccaggtgttctttattatgtagtttttctccttgggcaaagcatggcatgaagaacatggcagagcacacttttatggataatggagtttcaccacctgtccttgctttacttctcccatttcaaatctcatgtccataaagtctaatattcctgcatccctaatacttgaagtctcacatattatctgaagtatgtatgacattcattctctcatgtggctcttcatgtaactatttctcagacagctttgaattttccccagtgacctgcagttagtgggctttagcaagtaagtggtgcaagactatctcacaatctaatggtttcattctctcagcagtctttagagacttgcagtctggaagacatagatttcaaactctacaatggaccatttctggagggacacaccagcattcagctggcattctgggagtgtgtttagatatcctcggggaatgtgaatcctttctggacagaaaccatcctcaacccaacaaagaccctcatccttggaagcaagtcaccctcacacttaccgagaaatagacattgccattaggcaagactcctccaacaaccagatcacttcccacgttggtgtagcgatttgtgacaccgaagcccacccagccagctgtacggacctggagctcaaaactgatgatttcagcctcaaggtcaaagtcccaacgcaggaaaatgacattagaaggatctaggaacctggaatagcgcaggcgagatgtggggccaaggcggttgctttgtaaggggactcccagggccaaaagtggaaaaagcctgaagagaaggtcatgggccatggctcctgggacctggagcatctcccttgcagatgaacattcgagagcttcagagttttatgtcctacctgggccaggcaccatgccatgggggagggccaggctggggcacttctgatctgattatcctccgggttcagagcgatgccccttacataactctggaggtgagagatgcccagagaggatacagggcaggttgctttcactctgaagcaggggcctggcagaaaattcttaggattgaatcatttagactttccaccctgaccccatgccagcgtcctgccagtggggaccctgcagaatcaagaaagtttagtttctttttctccccctcccttcctgcccacctcttccatcttctatcctgggatgtctttacaggacattctgcctctggactatgcccccaccccactttttgtgggcatttcccattttgtctatgtatagaacttcggtactagcaaggatgtgggactgcttgtaaacctagtctttcaatttcccagtgcagtgcaggaaggagggaagtagctggcaaggaccggagggaaggctgcaatttccatctgctagaggaggctttgctactaatccctagaaggacactgagaggagggatatcagcttctcagatggttgagtcgggcagctttggttttctgcacactcctggggaggagcaggaagagggaggaggtgaggggaagaagatgagaaataaacatgagtttgcctttgggatgctttgtgctttcccttccggccatcaattacctttcagagaaattaacttaatggctgcatggcaggctgagcttgcccgattgagcacattagtattatgcaaacaatggaagcaacacagaaggaaggttagaatattagaacaccagaatagaaaagaactttagagccacttagttttccaaaaatttctatctccttaatttctagatgatgaaatgggagctccaaagggtaacaagagtggtgcttgatgccccgttgagtcaatggtgggtcatggtccctgaccataatttccttaggtcacagacaccctacaggtaccagacccctgccatgcatttccacatggcttgtcctggtggaagaatctagtgacatttgttggctgtttcttagggaagaaaccaaagtctgactctaactccacagtattttccccctggtgactgacacagctgacctagagctagaagtcaactcatctgacccctggttgctggctctccatttgacaatggagaggacatggaccctgagggcctctcccacacagactgggcctcacctctccacagaggaattcagctcaggagtagatgtacagatgccggcacgatctgcttacagcttctcattgcaggcatagtctttttttttttttttttttttggctactgagctcatcaaagctggtgaggacccagctaaggttgtttgctgctgctgtgagctcttgagtagtaattggggtgtggtgagggagaaaacaaatgcctcaagggggcagccacagcccctaactctaggcctgacagagaaggcagggagctcggcagccatctggaagcaagaggcttatcttggcccaggaccagagctgagccaagagaagaggagaggtcggagcctgggaggcactgaccttgaggagcagtaacaccagagagagagagagataacaggtgcgtggagacattctgatcccaatctcacttaaggattaagggagggggcagtagggagacaggatagccagtcttgtaaattgagacaggcccaggatcccttatcctgcaatctgtcctgctggacagagcactgtcctcagcacagaggcaaggtcctcaataaagagctgggagcagtgactgcagactcagagggtctcttctcctggatccttatctggcttccaccccaggaagccaggccattgctacacctgtgtggggctctctagggagatggggctggggctggccctgcttcccttctgcatttatcaagtgcctgtgacagggaagacaccacaagagggtcaccgacccgagggcagtgcagtcccaggtcttgaaatagtgaagttcagtttctaaacccctctgtgcctccttctcgctctctgtaaaatgctgcggttggagagatggtggatacagggccttttaagttgaatttcccagatgattggtttccaagctttctgaaaaatgaggccccttatcaatgttgaaaaataggtaaatctcattcttttttatgactgaacttaaagaatgtgattggattgtttgtaacccaaagtataaaggcttttttttttttttctgagacaaggtctcagtctgtcacctaggctggattgcagtggcataatcacagctcactgcagccttgacctcccaggctcaggcgaccttcctgcctcagcctcctgaatagctgggattataggtgtgcatcactatgcctagttaatttttgtattttttgtagagacggggcttcatcatgttgcccaaatgcttgatgtgcttatttcacattccatgcctgtatcaaaacatctcatgtaccccatacatgtatatacctactatgtacgcataaaaatttttttaaataatttttaaaattaaaaaaattctgagaatttaagcttttaatctcagttgagtactaagtgaatggtaattaaagactaaaattactaccagttgtcatattttaattgaatttaaaatttaccattgcaatcatagaagtcaactcttattgaaagcttagtctgtgccaagctctattctaaaatgtattgaccctaaatacatttagataatgtatacattatctaaaatgtaataaaaaaataataatttttgttattatttccatcctatggatgaagctgctgaaacccaaggtcccactactgggtggtggcaacactatgagctgttgggaaaatataactaaatctattattaagtttaagtaaaataattgaatattatataattatatgaattaatcaaatataattaaatatatttcataaataaatattattagaaataattcaaggagaaaaaaaatcccccaacccagaaaacctctctacaaaggtagatgagaacaaaagtacttttaaaatctttttttttttttttttttgagatggagtcttacttgttgcccaggctggagtgcagtggtgtgatctcaactcactgcaacgtccacctcccgggttcaaacgattctcctctctcagcctcccgagtagctgggattacaattgcccaccatcacgcgtggctaatttttgtacttttagtagagatggggttttaccatattgatcaggctgttctcaaactccttaccttaggtgatccactcacatcggcctcccaaagtgctgggattacaggcgtgagccaccgcacctggcctcattttttttttttttctaacaaagagcatcctgaaatattgagctgcaaacataggtaagaaagctggaaacttgcatggggagatgcctgcagctacaccaaaagaaaaggtgtacctgggggccaggcatgtccaccatagaagcttcatcttcccttttttgttagcacatgtacagtaagaaagaaatgggcaacatggtgcagctcaggccagagggagtagctatttgtcctcactcaaaataacatattctgaatttggattttctttcccctgtcaccgttactgtcctagcatcacattccttggattctctgaatgccttattgcattccacacaaaaatgatgtattctccaacaaaggaggtcacctcacagtgctattggagtcttatggatagtgctaatgcttatggaatccagtggccttgccatgtttcaccacctaggatcagctggccttatacaatatcactacgacctattgaaatcttaggaccagctcaagttgggagacatctttagaggctaaggtgctcctctgaaaaatggtctccaaaccattttcctctccaaactaaaatttcagttaataaaatatgtgcaaatgaagctgtcacagttgcacttaataattcgcactcccaatttagcttctcaatactgcaagctaggcgttactgatttaggggttttagagccctggatagatgaagttttcctactagaacttctgcttcctgagggggttctcttcttccctagctgggctgaaagactccagtagtccacttgtagcagccacaggctgaactctctaaaatctgttcttgtttttgtttttttaaatactcagtcaactggccaaaaaaacacctctccacttaaaactatcaattaaaactctcagggggtaacagactgcagggtgaagtgaagagagaaggaaggaagagaggaaaatactatagagtgagaaagtggagttcctgggcaactagctttatataaaaggcaagtatgtactaggaaaatctgtcattgatttcccgtttatctgctgtgccataaacctcagttaacttttatagtaactcctcatgtctccagtaaacactcagaatcctgcaacatgaatgaccagaatccatcgatggcattgagagttgcatgggcaaggagaagctaagtgtaacacctccctctcacctttgccctcccctcccctctcacctttgcccttctatatagatccctctttattagacttccttttttcaatcagcatagtaatgtgccaaaatcacacattgtctaatttggtgcatgtagtaaagggttttgtaccccaaatggctgtggagtggcctttattttatgtcagttaccaattcgttagagagaacataattcccacttcataaacttcaattatctgaggaattttgggttttccatccttatctagacggcaagaagggttgttatgaataatcacagtgaagatatgtacaagtaaaactgctcaagcacccactctgtttagcagaattgagacaggtatgcatggggcaatgtgaggagttaatttatatttaattctaaaggtgaacgatggggacaagctgtgtcatatggtccacaactgccacagctcagttattttggattacattttcaatccagggtatatagtaaaaaattttggcatagatgccaacatcggctctcaaaacacatccatccgcaaaagacaggattccttgaagcatcccattgcagattgccggggcagcagaaacttcctgccaggaaaacaataataacaacaacaaaaaagcagattatctttctggcaagacagaaggaagaaaatgggaaaattaatggatgaagagtattttaccttgcagggctgcctccttcctggcacaatgcccacacacagcatattttccgtgatgttgtaggttttataggcatcgcgacactgaggcttggagattacagagatgttcacagtttgcagtgaatcgggctctttgtctaaagaaaagatagaagtcaaacttccttaagagttttgttaggtattaaaacttcttttaaaaaacttttcttcttctaccatcagaaattaaaagagatcaaacattcagagaagtcagaactgtggcagttaggacaacgagggtataggagatgatcagattaacaatttcttatgatgcagaatcggtgaccttataaaagtgatcaaattcttgggagttacatgtacatgtgagacactccaggaatgaaatgaaacactttgttttaaacttttctggaaatttggctgggcacagtgctcacgcctgtaatcccagcactttggtaggccaggatgggtggatcacctgaggtcaggagttcgagaccagcttggccaacatggtgaaaccctgtctctactaaaaatagaaaaattagctgggcgtggtgatgagtgcctgtaatgccagctacttgggaggcaggagaattgcttgaactcaagaagcggaggttgctatgagccgagactgcgccactgcactccagcctgggtgacaagagtgagactccatctcaaaaaaacccaaaaacttttctggaaatttaaacattcaaagggtttcttttgagatgtaatttttagagtttgaatgaatttacagatatctggcctactttctcaattgtcaggtcaaaacaaaaccgagtatctgcacaaaaaagtcactgaaaaagcagttttcttaaacatataaagctagtaaatggtaaagctaagatttaaaactggatttcctggttcctaattaaagttcttttctttgtatcaatagtccacaaatactgtgaattgtgcacacttgtaacaaaatttgtccaatctgaaacaaaatgagaaaaacaacaaagtagtatgaacacatgtggcatgtgttctttccacggacgtttctttgggaagaagtactgtattttaagattttggtttttttaataatggaagagtatgtttaatgtttttatttgaaaataatgtattagttcttgaaaataaaatgtataagatccttcactttattttccaagcaataatttcatggctaaacatttcttttgggaatacttctgtaggaaatgcttacttaactacttgatgacccagatcaaaataagatgcattttttttgaagtcatatctcgttttgaaccttatgccataacccagatgaatcaaacatactgctcacagaaggacatttggctctttccaaaaatcaaattgactctcagaggacaaataatttctacttattgatatattcaagaaaatgtgctctaaatctgaaggtatttactaaggattagttttaaaaggcttgaatcatggcaacaatgatagaataagtgtacatctgcccattggtttctataaaaagaaagtagtgatggatagatgaatgtaatctgacaagtttgtttcaaataaatctccttttcatactatggtatctagtgtatgatgtatattatatatactcaaacttactcatgagtaaagttgcattaataattcttcacaagggattatatatcattgttctattttgctaataggtaatcaactccctttcaccactactctcaactctcgtaattagcaactatagacagttaattagggtttgcatagaaatttggagatggagtaatgggcagatggagatgcaacttagaaaacagaaagttgccttaagttgtgggtgttttatggaatatgaaacatgaggcctagaacaaagtttagatagactatctagttcaggagtttcaaattatgtatagaaaacttccattgataaaaataatggtagccctttgtcaattttctgaagaaatgagtgaatgcttagaatgttaccagtttaaaatgtttatttcagaagttctttttaaaactttaactctgtatctttattaaaatcttacataaggaagttctatcgcatttagtaaaatattatatatttatcttacatttaatacactgatatttatttcatgacttttcaaagcttcaagttgctttattgcctgaaatggtttgaaaatatacaacagagtaatctgctttattttagagttaaggaaattgaggctccaaggtaaaatgacctgctgtcacatagaaaattaggattggaatacaaatgttttctttccactaaaaccacttctatcatatatgaaagagaaaatgatagaaagatacagcgggtgaataaaaaaaacccaaaaaccttgaagcactccttcagtgaggtacagagaaaaggaaaggggggaaagaggttagaagaaagcttcactaggccgaattgaagaagccaagagtcgcgaaggtgtagaagcatgtctaattctgagagaagaacattgtcttgaactcacagatatcacacacattgtagctccaggtagagacagagcacatggtattttcagagatagtttggtagggcaggttggctaatttcacatagtcattgagttcagcctctgttttcagcttgattagcatgatgtcatgatcaatagaagtgactgagaagtgtggatgatgaatcatcttctcatagccaatcacttgcagatgcttttcattagagtctgctgggattgtaacccccaatatcacccgaagctttctggaacaatatagacgtttatgagaggacttaacagagatggcttctccatcattatgagcctctattatccctccccacagacctttttctgtaccctcgtatgtctcccaaaggcctttctaatcccatttaattgggagatggtctcagacaggggtgagagtctgtgcccaacctgagaacccaaagaatggagtgcctttgaaggcttatcactcacggtaaattgcagtgtgcagctgtgatcacccaaagcgggtggatcaggactccagcgcagggcaagtagtcagatttcaaatagaccaagtaagggggagtggagctgactgtgtaatctggattaaaggccaaagcaactggaaagagaagcatagacaagaaattccaagatttctcagtcatcaccagaaaaacttcaggaaagtcatttaataggctccaagttcccctatccttttctctagcaactttatctgtaaaatgacttactttgttctaaaacacgaagaaaagacaaatggtagaaacatatctcttttgaaaaataaaaagtgtttggctttttcactgtcaataaaatctttcaaattaaatgttcaactttcttaaataccttccacaatttagtgggttgtatgctaaatcaacgaatttttttcactatttttaccaattttagaatgcttcaataagtcttaaggcattcttatttagaatgctttaataagtcttatctctttttcccaacaacaactcaagacagaattatataagtatcatgacaagaacagaccaaatgctaagagtctgaggaggggaaaaataatgtattgttttaccaaatatacattgagcacctagtatatgtcaagctctgttttaggggcttgggctatatagtgaacaaagtagatattcctgctctcatatattacaattaatgaagatattcagtaataataaacacaacacacaaataaactatgtaggatgttaaatggtgattagtgctatggaaaaacacacaagtaaactatatatgatgttaaatggtgattagtgctatggaaataaaagtaggacagggaaagagagaaaggtattaccaattgtgtgttgcgggagaaggaggggtttcaggcagtatttgtttgttgtttgtttgagacaggatctcactctgttgctcagattggagtgcagtggcaagatcaggctcactgcagcctcaacctcctgggctcaagcaaaccctcctgagtagcttggactacaggtgtgtgccaccatatctggttaatttttaaattttttaattttttaaatagagatggagtcttgatatgttgcccaggctggtctcaaactcttgggctcaagtgatcctcccacctcagcttcccaaagtgctgggattataggcatgagccattactccagtctcaggtaatattaaaccagtcatcagagtataacttcatgggcaatgttgaacaataacatgaaaacgggggaagttgctagtcaaatatctgggtgaagggactccaggcagaggcaacagctgcagcatgggtcctgaggcttgtgtcagttacatcacagaggccatggctgctgacccagagtgaatgaaggggagcagaggaggaaaggggctcaaagaagaatggagggttttgtagaccatcgtaagaactcggccttgtttcctgagtacaaatggaaccactcaaggatttgtgcaaaggagtgatgacagtctcctcatggagaacctgtagagtgtagaagtatagaggtagaggggtctgttaggagaataatttgctaatccaggcaagaggtggtggcttagatcattgtgagcagtggagatggtgagatgtgattgaatttaggatacatttagaagataaagccaacatttttctaagagatcaaacgtggggtatgagagaaagagaggatttatgaataagcctgggtttatgcctgagtaactggaactgtgccaggagatatctgattcttcaatgttctgctgtgccctctgtggtgcagaacatcaatcctgttgcagacaggtccagagtcaggtcttaggagtgggtctggtatttgagtgacaatgtccacgcctcccacaaaagcacacaagcaaacctcctgcggcaggcaggcaggcactatcacaggaggaaacttgatgggaacggggcagtggagagggacagaggaccatcctacacttgaattctggaatgatgcctctcgctgttacccgtctttcatgcttttcccaggatttctctttggtgggtaaagagacaaatatgcacacactcaccagtcagattcaagagggcccagaggaggataaacttcatgatgatgttgaaagcccagtttagctccagtctctggaaaactgggaagagagagagaaaacaactaaataaaacaaagcaagattgtagaattggaaaaatatatcatctgaattattttagtagcaggattcagttttagaaatggtgtccattattcagaggagagtgtagcgtcatctgtcagagagacaagaatagagtcaagtgattggtccccaatacagttgaaaatggttctggaactcagagttctgccctctgtcttcagggaagaaagtaccaaagctaagttgaagttcatgatatctctacagacgcctcctgtctggtctcctttttgccagccttggtaggcaggttcccctctaaactatgtgtgggctgctgcccctcctgtctgtgtgatgctatcccccactgtgtgatgctatttttctccagtggacataatgtagccctctggagctgacattgcttcctctgcctgacattaaactcctctttgaaatacattaaccttttccttcatgtcactgtttatccatttattctgtgaaccaacctgctaattatttatcttatgtatctaacttgtgctaggatctgtgcttgctgttggggttgcctcaactgaaggatttctttcctaccttccaagagcttacagactagtgggaatgatacttaagttgatggttatgaaacaaagtattcagggctaaaaattgagatatgccacagactagataaaaatatttgcaaaacacatatctgctaaataattcatgtataaggaaatagtaaaattcgacattaagaaaacaaacaacacaacctaaaagtgggccaaagatccttaccaaatgttttagtctgcttggactgccataaaaaaaaccacagtctaggtgtcttacacgacagacacttactttcttatagttctgaaggtcagaagtccatgatcaaggtgttgtcaaattcagtttctggtgaggcctctctccctggcttgtggatgatcaccttcttactgcttcctcacatggcctttcctctgtgcacacagagataaagagggaaagaaagctctctggtgactctttttataaggacataaatcctattggatcagggctccacccttctaacctaatttagccttaattgcttccttttaggccctatcttcaatacagttgcattgaggtttaggccttcaaacagatatattttgcagtgatggggaagataacaccagagaatatatacagatggtaaatggcatatgaaaaaattcttaacataatatgtcattagggaattacaacaacaatgggataccactacataccctgtggaagggctaaaattcaaacactgacaacaacagatgctagtgaggatatgaagtatcaagaactgatgctggtgagaatttattgctgatgagagtgcaaaatggtacagtcactttagaaaatagcttggaagtttcttattaagctcaacataaccttactatatgatacagcaattacacttcttgatacaccaaaagatttgaaaacttgtgttcacaaaaatcctacacataaatgtttatagcagctttgttcaaagttgccaaatcttggaagcaaccaacatgtccttcaatagataaatggataaacaaagtgtgattcatccatataatgaaatgttattcagagattttatgatttaaaaaacttaactctcaagccatgaaaagacatggagtaaacctatatgcatattgctaagtgaaaagagctagtctgaaaagattatataccatataattccaattatatgacattctgggaaaggcaaagctatggagacatatgtatgtgcaagaacttttttcctataatgacttcttttcctccggatagattccaaggagtgggattgctggatcaaatggtagatctactttcagttctctaaggaatctccacactgttttctatagtggttgtactagtttacaatcccaccaacagtgtaaaagtgttcccttttcaccacatccattccaacatctatttttttttttgattatggccattcttgcaggagtaaggtggtatcacattgtggttttgatttttttttcatatgttttttggccagttgtaagtatttttttaagaattatctattcatgtccttagcccactttttgatgggattgtttttttttttcttgctgatttgtttgagtaccttgtagattctgaatgttagcgctttggcagctatacagattgcaaagattttctcagggttgtctgtttactctgcagattatttcttttgttgtgcagaagatttctcatttaattaagtaccatctatttatctttttgttgcatttgcttttgggttcttggtcataaagtcttcgtctaagccaatgtctagaagggtttttcctatgtaatcttctagaaattacatggattcaggtctcagatttaagtctttggtctatcttgagttgatttttgtgtagagtgagagatgaaaccagtttcattcttctacatgtggtttaccaattatcgcagcaccattgttgaattggctgtcctttccccactttatgtttttgtttactttgtcgaagatcagttgattataagtatttggctttatttctggattctctattctgttccattgggctatgtgcctatttttataccaggaccattctgttttggtgactatggccttgtagtatagtttgaagtcaggtaatgtgatacctccagatttgttctttttgcttagtcttcctttggctatgtggactcttttttggttccacatgaattttaggattatttttctagttctgtgaagaatgatggtggtattttggtgggaattgaattgaatttgtagattgcttttagcagtatgatcattttcacaatatttattctacccatccatgggcacggaatgtgttttcatttgtttgtgtcttctatgatttctcagcagtgttttgtagttttctctgtagaggtatttcacctccttgattaactatattcctttttttgtgtggttattgtaaaagggattgagctcttgatttgattctcagcttggttgctgttggtgcatagcagtgctacttatttgtgtacattagttttgtgtcctgaaactttgctgaattcatattccagttctaggagctttttggatgagtctttagggttttataggtatacgatcatgtcatcagcaagcaatgagagtttgaccttctcattactaatttgggtgccatttatttctttctcttgtctgattgctctggctaggactttcagtactatgttgaatagaagtgatcaaagtgggcatccttgtcttgttccagttcttagaaggaatgctttcaagttttccccattcagtataatgttggatgtgggtttgttatagatggcttttattaccttaggatatgtcccttctatgccacattttgccgattttgctaagggtgttaatcataaagagatgttggattttttcaaatgctttttctgcatctactgagataatcatatgatttttgttttaattctttttatatagtatatcacatttgttgacttgcagatgttaaacaatccctgcatccttagtatgaaacccacttgatcatggtggattacctttttgatatgctgttggattctgttagctagtattttgttgaagatttttgcatccatattcatcagggatattggcctgtagttttcttttttgttatgttctttcctggttttgatattagggtgatactgccttcatagaatgatttagggaggattccctttttggaatagtgtcaatatcttttggaataatgtcagcaggattggtaccaattcttctttgaatgtctgatagaattcagctgtgaatctgtctgatcctggacttttttttattggcaactttttaattaccatttcaatcttgctgcttgttataggtctgtacagagtttctatttcttcctggtttaatctgggagggttttatatttccaggaatttatccatctcctctagattttctagcttatgcatgtgaaggtgttcattgtagccttgaatgatcttttgtatttctgtggtattggttgtaatgtctcccatttcatttctgcttgagcttatctgattcttcccttttcttttcttggttaagctcattaatggtctatcaattctatttatcttttcaaagaactaggtttttgtttcatgtatgttttgtattttcttttgttgttatttccatttcatttagttttgctctaatcttgattatttcttttcttcttctaggtttgggttttgttggttcttgtttctctagttccttgaggtgtaaccttagattgtctatttgtgcaatttcacactttttgatgtagacatttaattctgtgagctttcctcttagcacctcttttgctgtatcccagaggttttgataggttttgtcactattattgttcagttcaaagaatttttaaattttcttcttggtttcattattcctgcagtagttcttggagaaaaagttgacgatgtgggtatccacatgctgctctgtccctccaagtgggagctgcaacctagtcctgctcctatccactaattttttcttgaactcctcctaaatgtgtatttttattaagccattaaatttgtgatgtttttacacagcattagaaaactaatacaaatgcatactggatgctggcatcatattctataatgatgattccatggcaagggagataagaagcttgctctcatacatcataatgcttaatgagggggagacagatgtaacaagaacaatcatcgtgaatgtcaaaggaaaagggaggtagagaagcatgtcgcaggaccctaatataaggtcagaagaagaccttctttgggaagtgaagtttgaaacttgaaggatgagtagaagttagccaaatgaagagatggggaagaaatctccaggtggatgaaccagagctccaaggagaacaaggaatgtaaaaaagagaatgaagagagagacaggcaaggagacacagataggagaatcatatgaaacagactttgcaggatttgtcgagtaagaactgcctgcaaaggaaatagaggaggcaatcagagagtaggtcaaagaaacatgtcctcgggttctgtattttagatgagtgaggctttattttccttaaatgataacaggaagaaggtgatagatagggaaaattggagataatcaatacagcaagtccatgaggaagtcagacaagatggggtccatttcacaggtagagatagaggctgtaaataataaggtcttacctccactatagcaggaagaatgaaaaagaaaaaaggtgggggaaagcaagtatgtttgcagttttagtggtggcaatttcagagaggtatcttctgctggtttcagtttttctctactcccacactagaggtcatctgctaaaagtgagcattaaaagtttgaggagagaggagagggtttgaaattgctactgcggagaattatacaaacaatttattggagaagataggattgccaataagtgctaaagatgtaattcaagggttacaagaagtaattagttgagctctataatcctaagtgaattaacacgggaacagaaaaccaaatatcgcatgttctcacttataagtgggagctaaatattgagcacacatggacataaacatgagaacaatagacactgcagattactagaagttggagggagggagaggggcatggtttgaaaaactacctaccaggtactatgctcactacgtgggtgatgggatccataccccaaacctcagcataacacaatatacccacgtaacatacctacgcgtgtcccccccgcatctaaaataaaatttgaaattaaaaaaaaactctggcacaaatacagacatgattcattaagggtgctttgggcagtgagtcagagacaggaaactggggaaaatgtgagagaagactggcaaactgaggacgtgtcatttggatggggccagaaattaaagaaaaaaataatcatatagtgaatgaaatggctttagtatctagattttagaacaaagaaaatttctgtgaatggaccagaacaagctattggtcttagatgcacctaagctctctggttttggttttttgttgttgttgttttagagacagggtcttgctctgtcactcaggctggaattcaatggcacagtaatagctcattgcagccgtgacctcctcccctgtcagcctcccatgtagttaggagcttttttttttattactattttatgtagaggcaaaggtttctctgtgttaccaaggctggtcttaaattcctggtgtcaaacaatcctcccacctcagcctccaaaagtgctgggattatagacctgagtcaccccatgtgggttttgttttgttttgttttgttttgttttgttttgttttaggagaagagaaaacacattcaggcatccaggttcagggtccaaaaaccaactcacctctgcagactttatagatgccctagattcactgcgcccctcaagggaagaaacctcaaacctctttacgcctcccacagtgggtttctcctatggtgtggttctctgttcccatcttcactggcctcctctgcccatcttttcttttttaacataagatccctatgtcatattgacccttttctctctgttgctctttggtctctcatatgtcactcaaacccctaactttggggggccactcagaatccccttaactctgtctctgtttttagatgatttggacagtggctatgggatgctgcacatctccccaacatatgccagtgtgagagaagggctgagcacccatcacagctcttctccataggagagagccctcccaaaccccgcagctcccacccaccaatgtaggactcctgtttgttagtcactcctcaggaagcatctggatttcagatcaatgtctccaactgcctgctggaaataaccacctctacatccttaaaggatctcaatatagcaggccacctgtctcctcatgcaggaccatgctcttgataccttgcacacaaatgcacttgttatcctcatattatctttgagaatcaccatcttacctgttgtccaagtcaaaaacttgggagagttatccctgacatctcccttgcctttcttcttacagtaagtatgtccaaatcttacagatgttacttccttagtatctctcaaatcagaaattggatggtgttttgtttactgtaaaagcttcaatgacaccccctccaatgcctacaaggtaaaaatctaagttcctttatagagcaggtcaggcccttcatctctcaacatttgcctgcctataatagaataatattttatggcattatttttccttttctacaatttattttctaccttcaaggtttgcttatttacatatattttccagcctataccacactttcatatgcttttttgccttttaataaactatgtgctcagttttacaatatcctcccctaatttgtccacctctctggtgttacttctcctggcactaccactcagaatgttttattttatgttttcgtggagcttactgctcatctctgttatagcagttatcaaaaggtattgtagttagctaactgatggccaaggtcatgtcatagtcactcaggcatccttagcaaaggccgtgcctactaaacagctagtggttaatatttgaatgaataaatgaatgaacaaacacaaggtgaagaggttgctaaatttctcattatcctcaaagtttacatgacaaagacagcaggagtcatggcacaggttctcagctactcattttttttttttaatcagatgtttcctctttggattttgttccaaaataacaaagatgaagagagttgtagatccagtgtagaaattatgaagaggtggtactgaggggatatgggaacagaggcgcctcagtgggtatccataattttcaagatccatcttgcatagctatgaacacctgtgaagaatccttcacttcctagggtgacacttccttctgcccaggacaagattccatgcaacctcccattgcagatggctggggcagccgaaacatccttatagagagaaggaacagaaggtcaatgtgtccttgtccttatggaacaagagtaaatgccagctgggcgcggtggctcatgcctgtaatcccagcactttgggaggcagaggtgggtggatcacaaggtcaggagatcaagaccatgctggccaaatggtgaaaccctgtctctactaaaatacaaaaattagccgggcgtgatggtgcgtgcctataatcccagctactcagcaggctgagaatcacttgaacctgggagacggaggttgtggtgagccaagatcatgccactgcactccaggctgggtgacagagtgagactacatctccaaaaaaaaaaaaaaaatagtaaattccaaaaagcggcacataacagtagcaaaaccatctaagagaatgggcttatttttcttgagaggtggcagacttctctttacatccacataagtcttacttctaaggttcaagcttgacccaacccaagtgcaagacaaaggacaaatagttctaccccaaatctctcccactctgaaagatgagaagggcaatggttagaaacccagaggtgagtagggagaggagagggactccagctctctgcttctctctcttaggaggccttttggatgagtgctctttgattctgcattatcatcactcctcccatgggactcttgctatcttccagtatagagaagggagaaataccttgtttttagataggatccttagagggtgtcctacacaaatgatgtttcctgcctgttcttctttgagtctatcctgacagtcacggaatggaagagaatattggttgatccatgtcaggatgtcaggatcactgactgtgggaaagagaaaacaaactccagagtgactcttcttatcacaagggctcttctaaccagatcctgttttgtaaataaattcagtcctgagaatattcaatgcaggtagcagcagacactccattctccgtaggattccttgttcagtaatctccatgttagagaagtaggtttataagtcccctttgtcagatatcaaatccataggtctttctgtgctatgcatcatttataaaattttgaaaaaactgtgagttattagtgaccacaaggagaaagagacagtaacgaaaccattgtctcaaagattttccccctacacacacacctttattgggcatctacttgatccttttcacgtttagttataaagggagaaactatttttagtgcatataaaactgctttttgagttacacagattatttataagtgtttatagtatgtgtattgatataaatatacatatatatttcccccaagaagttgtcatgttgttcatctccataatagcaattgctattatactgtcaaattcaggatacagggactttaacgaaggtatcatgtaatttaaatttctggtagagaatagcaaagagaaaggaaacaaaaacgctgaccaggccgggcgcggtggctcacgcctgtaatcccagcactttgggaggccgaggcaggcggatcacgaggtcaggagatcgagaccatcccggctaaaacggtgaaaccccgtctctactaaaaatacaaaaaattagccgggcgtagtggcgggcgcctatagtcccagctacttgggaggctgaggcaggagaatggcgtgaacccgggaggcggagcttgcagtgagccgagatcccgccactgcactccagcctgggcgacagagcgagactccgtctcaaaaaaaaaaaaaaaaaaaaaaaaaaaaaaaccgctgaccagagattgctcaagctaagtccagtgttgtttaaggagcaggattttttctgatagagtgtatccaatcaaatgccctaaagcagattaggccagaagttgtcaggtcagagaagaaagagaaattatgttcagttttatgtttttatgggaactaaattaaaatatgtgtaaaaaactaggtgaaagtaacttaagttacttgaaataatgaatttctaataaatattggaagccctgcaccagaaagcttatagaggtagagtttgtcactgtgattttgacatgcagagcctatatacctctgaatagttttgttttgttttcaaattgtacgtaataaattacttctgtaagttgtaattcaattactttgaataagacttacaaaatcaaggacaaaaatcatacaagctgtaactgttcagaaaacatgttcacttagattcccaagtacttgcttctaagtggaaaaatgaatctgcaaaatactgagaatataatagtttctgctttttatttctgttttttaccaaagactgacttctaaaattccacttttatttgcttttacagagcacgtgcattgttctgtagccaccagagagagatttaaacctgattaatagatccaggacaacttgcttgagtgaacataacttttgcagtataatcaatgtcagccttcacttcttaaaaccagctgatcaggatcagaggtcctctgaaaaacacgcctcagagcaccaatcaatcaacagcaatccccctgaagtagccaggcctcaacagatgatggaacccattcatacctctgaaagtcctccaatccctcaactccaagcttcccacaaaccccttatgctaatcagcactccattctgcttagtgggatggtgcctggtcagcattgctctgacttgctgtaataagcaatagatttacatttgtcatttcatttcagatatcaagtggtggtatcctcatcctcaacaatacctaaggagagaataatggagtaacagccaacaaggaccaacaaacttattagaaagtagttttcttcacaggtgttctttattagacagactcctgctgagaccggatctttctgctcatcccaatttcagctcacaggggagatggatgtgtgcttacaacatgggctgccactgtttttcttgtgaggcatgtcagaccagggagataacaactgattatgtcataataatcaatttccctacgaaccaccaaagtctccacccctaaatgggaactctgggaagaagcagtgggtatgagtagcactctgtgcagggaaccagctctggtgacaggacaggtactccctcaaccattctcttctctcccagggttctctgcacataactgggttctctgcggaaggtgtaggaagcatcttctgctgcttcaccgcatcacatatattttatgttcatttcccccactgttcttccattgtgtgatgggctttcagcaactatcaatgggtgtcaccctcccgcaggctgccttcatactgtctttgtgcacgaggactcctatttctcccacctgtatttcaatccagttctctggactcttgtcttcaatattctagagatatgaaaattactgtctgctccatttgttggtgtcagagtggctgccctttatcagtctctttgaattttatctttgacctccagtgatggtggtttgggtccctggcaggaatccctctatggtggacaacattgtctcatagcagcgatttccattagggacatccctctacattttctcccagctccaacctcctcagcataaagaacacagcatccaacacatacggtttttatattcattccaggtccaggttggaataaagcaggattcattaaatggaatgggttccaaggctatggctatagtccccacatgggggttgagtgaagcaggtgttgatagcttgatcatcattaggtcatcgttcaaggattttgcatcaaagtcagggtaggtcacaatcgatgaatagtttcatatctgttgtttcttgtttgtgatgctaggttgagaaactcccagtcgaatttcaacactttggaagaaagagggcagagagatgagaagaaagagagtcataagataatggattacaagaaatcctacgggccaccctctttaattattttaactttatttcttaacctgagaactgacatggccttcttttgtctataaaacaatagcagtaatttacagaattgttgtattagagacataaatttgtaaaatgtctgacatcgtgtctggcaactaaaacacaagtcagtggagccttgttattaagatttttatcatctgaattagcagctaatagagaggcagcacacatccagttcatgtgttaagtatggatgtaagaaagaacatctgccttttcaatttttattctggaaggatgtgaactgtgtatttcctttgtatttcccatataccacagagcagaggttagtctgcgttaaactaaactgccttgaacagccagatggctaagatttctgaatttgaaagaaccgttctatactcatgaaactgagtaggtcttgatcacacagcacattctcacacacaacagaaacactgagatttgcaaggaattgctttattttgtatcgtgctcccttgccctctactgtcactgcatgatatggcttctgcctaagtctttgacctcatcctatgagcgatccccctgctcattacccttaattcctgccgatttctcagcttaatatctttgttacttcagggagtatatgaatattgttcccttggcctggaatatcccccaggatttattcatttggctggctccttctcttcctatggatctcacctcttcagagatgatggacatgaccacattaactaaagcagatttcttatttcatgcccatatattagagcttgccattaaaaaaaatactttgtttttggccatttatttgtggtggctactccctctaccaaaatgtaagctccatgagggaacacttattttcatcttgttccttcactgtttcatcagtgattaagtagcccttgctagataataaatgtttaacaagtattgttgatgaatgaatattatttactacccatgagagggaatcctctgacatcttcctactgatctcctcctaaactgcccaaatttgtgttctgtttcccaatgggaacaagagtctctctttttccgtgtcttctgattttactaaaaattttctgggatgcttcaccagatctacatttgtttgaacagattcctcccagctcgcaagagaaagggatacttacggtaaggggcagtgggcagctgtcaatacccagtcaaggtgaatgagagaccccacgcagggttctgggaaggactgaagatagaccatgtaaggaatagtaaaattatatgtcagctcctgattatctttagagtctttagccagagcagctcctggagaatcaaggggccataggtggaaagggaaaaagaagttaaaaggccagaactggctagggtagttttccctaacctaaggttttcaaatgtaatgtaaaggtcttcaatttacctttcatattttaatcaaggaaaattatgcatgtcctctaagttatacacaataagaaaattgacacatggttttgctgagatgaaattacattaaaattctgtgaaacttacttacatgctgatcagaagctcctattggcagtgctgtgtgttacaaagatgaaaaaaataatgactacttgaaatttttttttaattcacttttgccataaatgggggtaaaaaagtatggcgtgatttaaatttttttaaattcacttttgccataaattggggtaaaaaattactgcctgactttggtgatgaaagaaatagaaaagcttagggcttccagagcccctgacccagctcaccccccttttccaggcccatgttctctaatgtggttccttttgttttcttcaacggttgttttatttaaatgtcctccgcttcctagctgtttagttgtgcccagctactcctctttccaatctttcatagactatcctgggtgtcacaataggcagaaacaaagccccaaactctcaccagctgcactcaagagagcgacgatgagaaaacccttcgtggcagacagatctcgccaggaacagacaagttgatcaagctgtaaactgtcccaatctttagtccaagtgtccttgccaagaacagctgtggagattatgggcagaagacagatgagaggagagcagtcttcacatgagtccttatcaagacccaaatatatacggcattgctgggagccgtctctgatgtgggtgaaagagagtggcacagaccaagccgaggtcctggtgcctcctttcctatcctacaaatcttgcctggagttattatgtacctgctgattttccttctcctctctatgacacaacctttctttgttgtctccttctccctctgtgacttaaaccgctctccctgcccatcttgctgccatctcacctcttccagagacttccagaggattggggtatgaaatgcacttaataaatcattgcttttttcattccttgtaattttagtgatgaggaagctatggttctcttggaagttagtggcaaagtcaggactcagaactcagtctccatattctctgtgtcaaggctgaactctatcttagcctgtgttcccagaaaagagcaatggttaagaaatccctccatcgttttgtgttcttagaaatgaattaccacaaagagctacctttcctatatgacttaaataagactctctgccccttctttctcccagctcccagaaaattttgcatggttctcttgcttacctgtgatgcatcaaatacagacctttcctcttttgcccggacttgctgacatggccagacatggaccatccaactccccattttttgtttcaaaaatgattagctgagattagaatggtttgtctcttcgaaactagctacattaaaaaataaacatttcctattcagccaactaactgaggcttccccctgattgtaaaacaacccccactataaatctccccacctcaaacttatctttttctccctataaaaattccagggcaaaaccaccctgccaagatacttcataatcttcagatcttggatgctctcctattggatgatctgaatgcaaccaatctccttactagttcactttttgtcttctatgctgattactctcaaaatgcatcccattttttctttttattagctacccgtatatggtaacttccagcctgtcccacagagacgggtaataacagtaggttcaatcccacattttatatagagtagactggaaaaatgcaaactatatagtatcaaactgatctttatcagagtaattaaggagctgatcagttataaaagtccataaacataacattcctatatctgtaaaaattataggcagacttagttctcctaaaatttaattattaacttaaaacctcatcagtatgttcccatgtactctaaacttttggggacaatatttctttagtacccaaaggttttaaaataataattattaaaataataaagtcagtatttgttttgtaccatgtgacaaatactgtgctatatgcccagcatgtgtgacctaatttatcctttatcacaggcctatacattaaatatcgttattatccattttcaagctgaagctctgtatggttaaaaaccttgctcacaaccatactgttgaagcccacgacccccaacattttaggaaatccagcatccctctacttgttccaattatttatctggtaggactgggccttatttctgctaagttctttgcttatctccagacttctttgtcccagcacatgaaaacagctgtcttcattttatttcttaattcaccactaacctaattctagggtgggtttcagacttttactgaagctttggagatattacaggaaattttggcaccagcctgaaaacatctttaaatagtatatcagaaatcactttgtgaatgtttatgaatcacctacagtccacggagtctgttaacctataacctggtttctgccacattgctggaacctaccctgaattccttttttattttcttgttttcttcatgtctttagtcagctcacatttctgctgcccagaagccccaagtagagagagacaaacatctacccttttaagctatcggaggagaactgaaaatttttgttactatcttacattgagaaatccatattttctctctctattctcaatctctgcctccctcccacaaagcctcaccaatgagaatatgaaggcgactattgttagtttcctttcttttaaaatgtctttttcttttcttttctcatggaaagaataggctaaatacaactatttgctttgtaaagaagtgagacgatacaatttatttaatggatataagagattatagtcactatcttctttataatttctcgtataatattctaataaaggtcactcaattgtgacctcggcaagcataattcactgcagaggcagtggcctagagctgtcagtttcccctggaggctcagtccagggagttgctgagttggtactggcatgacagctctggtgaggggtggctggaggcccaggcctggaggacctgcccagtgaggagatatgggaataggcacctacgtaccagtctggccacttttctgtagggttgctgcaatatgcttggggcctgctccagtctctagtcaccttggattttctagaacctggaggtgtcaccaatgaaggctgcaaaacagcaaagatggtagcctgtccctgcctctgggagctttgtcccagggaggtgcagacatattggcagcccaaaagcacctgtaggatgtggctggagaaaccttacaaaccagaagagattgcaggtctacattcaacacaattaaagaaaaaaatcttcaaccaagtgtttcatatccagccaaactaagtttcctaagtgaaggagaaataagatctttttcagataagcaaatgttgagagactttattatcaccagacttgccttacaagggatcttgaaaggagcactaaatatagaaaggaatgattgctatcagctgatacaaaaacacacttaaacacacagcccagcatcactgtaaagcaaccacacaaacaagccaacataataaccagctaacagcacaatgacaggatcaaattcacacgtcaaaactaacctttaaaactaaacaggctaaatactctacttaaaaggcacagagtgacaagctggataaaaacacatgacccaatggtatgctgtcttcaagagatccgtctcacatgtaatgacactcatagcctctaaataaagggatggagaaaaatctaccaaccgattagaaaacagaaaaatgcaagggttgcaattccaatttcagacaaaacaaagatcaacaaaagacaaggaagggcatgacataatggtaaagggttcagttcaacaagaagacctaactctcctaaatatatattcatccaacacaggagcatccagatccataaagcaagttcttagagacctacaaagagacatagatccctacactatgatagtgggatacttcaacattccactgacagtattatatcattgaggcagaaaattaacaaagatatttaggacctaatctcagcattggaccaaatggttctgataaaccttcacagaagtctccaccccacaacaagagaatatacatttttctcattatcacatggcacatgctctaaaattgaccatgtaattagacataaaataatcctcaacaaaagaatcaaaatcataccaatcacactcttgggccacagtgaaataaaaacagaagtcaacacaatgaaaattcctcaaaacaacacaattacatggaaattaacatgctgctgaatgagttttgggtgaacaatgcaattaaggtggaaatcaagaagttctttgaaaataatgagaacaaagatacaacaaaccagaatctctgggacacagctaaggcagtgttaagaggaaaattcatagcactaaatgttcacatcaaaaagttagaaagatctcaaattaacaacctaacttcccaatgaaagaattagagaggcaagaacaaatcaaccccaaaagaggataagaaataacacaaataagagctgaaatgaaggaaattaagacacaagtaaaccattcaaaagaccaaagaatccaggagttggttttttgaaaaaaaaaaaaaaaaaaaaaaacaaagccactagttagctatttaggaggaaaaaagagagggtccaaacagacacaatcagaaatgatgacgggaatgttactactgaacccacagaaataaaaacaaccatcagaaaccaatatgtacacctctacacacacaaactagaaaacctagaggagatgaatacatttttggatacatacaccctctctagactgatccagagagaaactgaatccctgaacagacctataacaagctccaaaatttaatcagcaataaatagcctaccaatcaataaaagtgcaggatctgatggatccacagctgaattccactgtatgtacaaagaaaaacttgtaccattcctacagaaacaattccaaaaaattgaggaggaaggacttctccccaactcattctatgaggccagcatcatcttgataccaaaacctggcagaaagacaggaaaaaagaacacttcaggccaatatctttgatgaacaaagatgtaaaagccctatacaaaaatacttacaaactgaatccagaagcgtatcataaagctaatccaccatgatcaaataggcttcatccttgggatgcaaggttggttcaacatacaaaaatcaataaatgtgactcatctcataaacagaactaaggataaaaatcacatgattatctcaataaatgcagaaaaggcttttgataatattcaacattacttcatgttaaaacgcttaataaaccaggtattgaaggaacacacctcaaaataataagagccatctatgacaaaaccacaaccaacattatactaaatgggcaaaagctggaagcattccccttgaaaactggcacaaaacaaagatgccctgtctcaccacttctattcaacatagtattagaagtcctagccagagcaatcaagcaagagaaagaaataaaagacaaccaaatgggaagagaggaagtcaaactatctctctttgcagatgacatgattctatgtcaagaaaaccccatagtgttggcccccaagctccttcagctgataaacagcttcatcaaaactgcaggatacaaaatcaatgtacaaaaatcactagcattcctatacaccaacaacaaactgagagccaattggaaagttagtcccattcacaattgccatgcacaaacaaaaaaacccccaaaacctaggaatacagctaatcaggggggtgaaagatctccacactgtgaattacaaaacactgctgaaagaattcagacaagacacaaacaaatggagaaacatcccatgctcacagataggaagaatcaatatcattaaaatggctatacttcccaaaacaatttatagattccatgctattcctatcaaactaccagtgacattcttcacagaactagaaaaaatattttaaaatttatatggaaccaaaaaaacaagcccaaatagccaaggcaatgctaagcaaaaagaacaaagctgaaggaagcaagttacctgacttcaaactgtactacaagagctacagtgactaaaacagcatggtactggtacaaaaacaggcacatagaccaatggaacagaatagacagcctagaaataaggctgcacttctatgacatctcatctttgacaaagctggcacaaacaagcaatgggacagagcctctctattcaataaatggtgctgggataactggctagccaatggagattgaaactggaccccttctttacaccatgtacaaaaatcaactcaatatggattaaagactaaaatgtaaaacccaaaactataaaaaccctggaagacaacctaggcaataccatcctgtacctaggaatgggcaaagatttcatgactgtattagtcagtttgcatgctgctgatgaagccatacccaagacttggcaatttacaaaagaaagatatttaactggacttacagttccatgtggctggggaagcctcacaatcatggcagaaggcaaggaagagcaagtcacatcttacatgacggcagcaggcaaacagagagagcttgtgcaggggaactcctctttttaaagccatcagatcttctgagacttattcactatcacagaaatagcatgagaaagacttgctgccatgattcagttacctgccaccgggtccgtcccacaacacatgggaattccagatgagatttgggtggggacatagtcaaaccatattaatgaaaaagacaccaaaagcaatcacaacaaaagcaaaagttgacaagtgggatccaattaaacttaagagtttctgcacagaaaaagaaactatcaacagagtaaacagacaaccttcagaatgggagaaaatgtttacaaactgacaaatgtctaatatccagcatctataaggaacttaagcaaacttacaaaaggaaaacaaaggaccctattaaaaagtgggcaaaggacatgaacaaacacatctcaaaagaagacatacataaggccaacaagcatatgaaaaaaagctcaatatctctgatcataagataaatgcaaatcaaaaccacaaggagatatcatctcacgtcactgagaatggctattattaagtcaaaaagtaacagaggctggcaaggttgcagagaaaagggaacacttatacactgttggtgggaatgtaaattagttcaaccattgttgaaagcagcacaacaatccctcaaagagccaaaagctgaactaccattcgacccagcaatctcattactgggtatatacccagaggaatataaagcattctaccataaagagacatttccagaaatgttcattgcagcactgctcacaatagcaaagacatggaatcaacctcagtgcccatcagtgacacactggataaaataaatctggtacatataccccatgaaatataacgcatccatagaaaagaatgagatcatgccttttgcaggaacatgaatggagctagaggctatcatcaaattagcaaactaacccaggaaaggaaaaccaaataccacatgatctcacatataagtgagagctgaatgataagagctgatgaacacaagaaggaaacaagagacactgaggtctacttgagggggatggtcggagaagggagaggagcagaaaagataactattgggtactgagcttaatacctgggtgatataataatatgtacaacaaaccccatgacacgtgtttatctatgtaacaaacctttacatgtacctcaaaacctaaaataaaacttataaaaaagcataattcagttcccaagagatttttcctggatgtgagatgatgtgtggcttagaaagtattcctttattgtttggctctcttccctacaaaatgtaaattctaatttcgttcctcttaaatatgaactggcataattttggagaacagtttctaaaagtcaataaatttccatctggctctcttcttcaaatattcttagagtacatctgctttgctataagtaagctgaagccatcccatctggaggcaaatagagaagccatgcacaggtgctgtggccaaaaatcaagctgaagtcccagctgacagacagtatcagccaccagacctatgagtgaggaagtctttgagatggctccaagcccagccaccagctgcctgcaaagcatgagagattcccagcaatgactgcctataggagcccggtcaaatcctaaagccatgagaaatagtgataacaagtgattgacattgctatattctgctaaatttgaagtggttttctatgcagtaatcaataaccaggactggagtcaaatcatttccaactctactccgttttctaatggtgataggtgaagcaagtatgccaagagggtgattctgcctgagtggttccggggtccctgttgtgtcctcccaatcctgaaggactggaaagcaatttatctgggtccattagtttgctctaatttcacgtttaagcctcaattctggggagtggtggcttgatggacggagggatcaagatcatccagagaagggtttggcagggcagtttaaagtgagcatgaggtgtgattctttccacctttagaactaaaatagaaaaaggattagacaacgctcctatgagagaagatgttggaatctacagtagaaaagataagagtatgagtgttcataatacactacctgtaattctcatggtagcctctgaagcttgatcataatgagctctgattatgacacattttgtagccatacgcccttgggcaagtttcttatctctggctttatcagtttcctttcttgtaaaatgaaaagcccattacatcgattgtttttaggaaaatgaaaagagttagtgtttttaaagtggctttggacactgcctaacaaatagtaaatgctagttaaatgttggttaaataaaataaaataactgtaactttaggattcccatattttccaggctttcagggacagtaatttatcttatgtcaaaatattgttgtgaagttcttaaatctttatgatattttcttgtttctttctttgtttttttttttttttttttttttttttttttggttaacatggtgaagagcgtggagaaggacgtttaactaccttaagcctcagtattctaagctataaaatggaaagaagattagtacttacctcataagatagtcatgaggattaaatattatttaaaaacacttaagcaccgtatatgacacacagaagataataaatgtgagttatcatcactattacctttttcacctctgcaaaactcctgagtactagaaaggagaaaaccttctggatgctcctggttcacaggattgtgtgatttggctccagcaatgtcttggaactgggtccctcctgaggtcagtgattcagaattactggacttcttaggtttcagctcttcctagctcaatacccctctctctaaagagaaaaagtattaccccctccaattctactcatgtttcactagggacatctcgtgactagcatgaggctcagaaaagatgtggagggatgagagggtggagcaggtcagtgctgggaagcctcccaacctgaatgggttgcactcattgtcagctggctttcttcctgcagattagggtggattaagggatttttgtaaggtgagaaagattaatactacattttataagccagacatcctggaaatttcattaaagacaaatgttatctttgttttataaaacccaacacctgtttatcaagaaaaatgcagaaaaggaacaacataaatatgaaacaacaataaaaacctgcaactccttttagagttgctcgcattgacatgtcaggcaccacaaaatgatctttttcctttaccccattctttatattttttccctcgccaaaaaagtaaataattcttttttctctagtgattctcctgcctcagcctcctgagtacctggacctgcaagcatgcaccaccacaccccgcttattattattattattattattattatagatacaaagccttgctatgttgtccaggctggtctcaaactcctggcttcaagagatcctcctgcctcagcctcccaaagtgctgggattgcagacataagccattgcacccggccaaaatttaatagttgtttatactaaaatttcttctctttatattgctgatgtggtttgtatttcctgaatgaatctggagtaatacaatgtctgaggaaaaacctttggtggaacccacagctatgggaagataaattttctatggtgtgaagacactttatttctaatatttggtaatgtcaatatatgattgacaaagaaatataccttccccatcctgcctcattcttgttacccagatgtgggtcatcttttgcccaaagccagtgtttaaagctcatctaactactattttattccattctccaaatcagattcaaaactaaaatacagtagcaaaaataaaaattgttctggacactacacaggaaactaaagaaaataatttgtattatattaccacacagcataattttctaaagacctattttagttatttttattcttttttgaaatttcttcctaagtctatcctaccttacctcttttcttcttctacatctctaatgtctctctctctctcttttttaaaagattattgtcttctccattagatccagccttcagtttgcatatctcactcagtagaacatggcaggtagccatcctgtgggagggtgtaactctcccatcccatgtggcttatgaagttattgattgaacaaaaatgtagctgatttgggttgaaagaagggggttaaattacatagctaaaaaaaagaataaaatattttgttatgcctctttctcaaatgaaatgagagattttgtccttttttttttggtaaacacatgtaaaacaatgtaataatgtggagaacatgctaagctacagtgaagaaaatttatttttcctagacatggcagtaaatggaaatttctttatcaagggcaaaataatcctagtagttaaacaggaagaagaaaatgaaaaggacttcaggggattaaggagggagttactgatttcaaaactgcagtttcggagttcaaagtgttgatcatcaaaaacggaaaatgtgattttgaagtgaggaaaccccaaaagaaagttaaatgataattcagtggtgagagtcacatcggagcagtgtctataattcttatgagtgctccttggaaaagaaaatggaggaagaggtcctgtgggagaggcagttatgtgtaaagaaactttagaggcttggagaggcgtttctcagaaatctgcccagcctttccattctacatgcaatagagagaaatgcagtggggtgatgagggaggcttctaacacgccaggacaacaatccagtgactcccagggaagcataatcttttgtcttataattttttaaactgcagatatagtacatgagtggtatgagaaattaccacaacacaaagttgtgtgaactgtgaaagttccccttacgaatgaagacaaaactaactttccaacagttcttcagaacatatggccttatattttctgtttggaaaacagtgtactctactgctatcagatctttgagccagaagctggccttggaggaaacctgtggcctttcactgcatgggtccctccaagtctaataagagtctcagaggcagagctggcaagggctaagaacactgcaaatagaaatggaccacaaaaataggaaagtcatttaaaaaatgaagttggattatgcacacggacgtgtccttaaaaataaactctgttaagtaatgaaggctttgcatggggactgtgtacataaaatcacagtagactgttgaggtcatgttagagcgcttatataactctcgggtaagttttgatgaagggatttgtgccttgcagtgagaagatgagatcagttagtaaaggagaaaatgaattgatttattctgtagaagtagggaacttgttaaaaaaatggagaaactaagaaattattgaaaactatgatttcttcaagatgtctggaaatcctatagtttagatggcatacaaatagaaagtggttagactgagctagtcagaataaatgagtatctctaggactaagacttttgtatttgtgccccatcaacaaattgacattttaaattgacttttaaaagtgagactaaataatatgaagatagaaaatattttattttttaaagacattttaaaatttgatttcaaaactaaagtcactttccatgaaagataaatagtggtgttacagcaaaataataaattaaataagatttataggggaaaagagataatttatttatagagataaatttagcaatttatcttattaagacaaatgttcttatataaatattcttgaagccctccctactcctaagcttccatttgtgaattttttaaagactttattagtcagatattctgttccttgcaacttcctaagagatgtgttcacatttataccttttttttttaacttaaacgcttattttattagggtgaatttataaaagctaagttgttgtttaaaatggcatatgacatatacagtttaataaaaattcacaaattgtaaagcattaaacaaaataagagactgaaactggcaagaataagtactaaacaaacactattggataacataaaggattaataatttgtttgcctttttcttttctctggacctgccctgatctctcatcttctgtgtatctcacacttcctgttaagtcttggaaccttccctctatctggggtgggaagctgaataggtaggtattgatggtggtaattaagtggagcagaaaagtatttcagagggaacagggaaaacttaatctcattttgttcaaggcggaagcccaagatgttttagttggggtagatataaggctacctatttacacaaagagagctatatatgaaattaatttagattatacacaaacataaaaacaattcaatgagaacaaaggaaataagacagaaaaggttagttgtgatcaaatatttgagaatgttgaatgcaaggctaagaaattttggctgcattttaggggcagtgataaggcagtattaagagctcagcttttctctacaaacatgccatccatacttacaaaaggatagaaaattgctaatgggcacgtatacctttcagtactctcctcctctgaaatatttattatggactgcatgtttgtgccccacttcccaaattcgtatattaaaaatttaacctccaatgggatggtgttgaggtggagtctttgggaggtaattaggtttagataaggtctagagggtggcccccatgatgggattaatgtaccaatttgtaagaagagaaaaaggactagaactggctctcttggccatgagtggatgcaactagaagatggccattaggaaacgtggaagctatcctcaccagacaccagactacctggtgtcttgatcttggacttcacaggctccactgcaagaaataagtgtctgttgtgcaagccacccagtctgcgatatttttgttatagctgactgagctgcctaagacagtacccttccttcaccttatcactgaaccacaaataaactcccatttccaactgcctccacctgtaccgttctgttttctgatcccagtgtgtcttttcctttgtctcattccagataaccatgagagtcacgtgcagggtcttctgctccaagccctcctttcaatgccacacagaacaatgaagatttgagggacgactcgtggaagaactaaagccagagtctgtgatgcactcttcaaacaggactgaagagaatagataatatatctgtagccatttatgacctcaaggcacaatatctattttctgcaaacttatctgaatttgtacctttttgtttctgtttgtagtttaaattagtacatcatgtgggctgggatttgggggaacttgtggtgaaaaagggacacagattgtctccagagaccaggcctgctatagcaaatttctagttggaaaacaagaaagatcttggaggaaaggaatatacaggtaggtgaaaccttggaaaacacaggaaacctgtgaattttaaatatttctgcatctacaggtttctgctacctagcttcccagagtttcagacagattgaagaaaaaggaaagaaagaccattctgttctatcagcagcaatccactgggaatgcccacttgggctttatcttagctttactgtgaatcttttgaatgattttgggcaattaagtttaattttctgcattttagtgtcattatatcttgtaaggtatgaatgcatgatgtaccataaaagttcatgttttcaattaattgatttttatttttagagatagggacttgtgtctcctaggctgaagtgcagtggcacaatcaaagctcactgcagcctcaaactcctgggctcaagtaatcttctcaccttagtctttcaagtagctggaactacaggcatgcaccaccatgcccagataattttttaattttttgtagaggcagtgttgtccaggctgatctcttaactgttgcccaggctgatctcaaactcctgacctcaagtgatcctcccaacctggcttctcaaggagtttggattacaggcatgagccaccacacctggccccagaaatgcaagttaaaatacatactgtggccaaatcttaaaacaaaatttatctgacatatttttagagttcttgattttgtaaaaaaacaaaatgtggtggtaacagtgacctctaagcttgttcacctttttattctcaatgtatcacatagagtttggcatatagttggtgatcagtaaacttatattgattaggttgaattaatgactaaataactgcattagtccattctcacactgctataaagacatgcctgcaactgagtaatttataaagaaaagaagtttaggcagctcatgattctgcaggctgtacaggcttctgcttcttgggaggcctcaggaaacttataatcatggtagaagggaaagcaaacacatcttcatgtggatggcaggattaggggggtgcacccacttgaaacaagctggttttgggagaactctatcacaagaacagcaagggggaagcctgcccccacgattcaatcacctcccaccaggccccacctccaatactgggaattacaattcgacatgagacttgggtggggacacacagccaaaccacatcaataacctttcacattttctcaatataatagtttggccctatgtccaccttcttaacagctagtttcaagagaaagttaatcaatgccgacagggaccattcttgaaaagacgtggtacaagacagtatatttttatttagatactgtgttttggcatagaaagaaggtaaagttgatgaataggatatggaacatgaagagataaaggtgtttagttggcagcaatggtctgctgaatccatttcacgtagttgcaaactttagtgtagactccaggtttgttcttctgaggacaaccatagccccaggagacaatgccctggagttctccgttgcagaccacaggaacaccagagtcaccctgggcaaaaaggaagggatattcagagatcttatttatgcccagatgggagaatgggccgtaagatgttcttccattgtgctggagccattgtcccacactgctgatccagcatgaagcactttctcttcctcttgaaaccctccaaccctcaatctacttactatatcagtagttagtcttccttataccttatttgagccccttctctttccttggtaggccaagtgggccaagaggaggtttcatgctgcttaactagctctgctccttccgctagagttcctttccacagtttacctcctcagaagggcacttagaaatactatttgcacaccatcttctgtgcatcttttaactcttaaacctagacattaatacaataaaaataaaatatttaatttgtcccaaggctatccctcacctctcacaatcagttatagggactgttttacaatcttctgtgtttctgaaaaggggaattatggtggagaagactaagaataagctggaattgagaagcagtacaaagaaactaacctggcaagagtcctttcaaccctccaggaatcccagacatatcatgtttgtagtaatcttgcctgggtaggctgtgcggcaagcagtgttagagagaatgggagccttcagacactgcaggagatcagggtagttggccgtggagtggaagagtgaaaaatgcaagattactcatgaggtttccaaaattttctttctcaatacatctcccctcttccccaatactctcactttttctttcaattagccaacggcttctcatttgagagaacaatactttcttttctagaagctttcccaaatagttctaatcaatgaattgttccaattcattccaattgaatgctccaagcaagaccaaatccctgagtctttgttttgtttacctcctcagtttatagttctctgcccatcactaatcacacttcagttaaataccctgatatcttcatagtacttcattattatgtcttctgcatggttccagcaaaggaatcttcttcatttcaattattaatagtatatttctgagattccatgtatccaaaaactatgctctgggaacttaaccttaagtgagtttggactagctgactttccacatgtctttcagctctaaaattgtcacacttggtacttctgtttcaggcgacactaaagccactgctcagggtgttgtcccagccagagatgaggcactgagtaccagccgctgcacaggatcttggcagagagatggtggccacttgagagttgatggtggcgactgagctcagcttaatcagcatgatgtcattatcaatggtggctgagttatacttggggtggcaaataatcttggctgcatttatgaattgttcattgccttcatagaccttaatgttgtattctccaagatgcacatggattcggctggattaaaagatataagaggttcctaagtatctagcttgagttatttccactcctcctgaccccccatttatgagcataaacacagacaccatccttttcaagcaatcggtcatacagtaattgtgcacttaaggtagcattctgcaccaccacatggtacaggttagagttttccttagagaagtgtcactgcaagtgcagactcactgcccgccatcttgttagaatagtaaggaatgggaatgagaactcaaggacttgaataaaacagttggagataaaaaggaagttggtggagattgatcagcatttgccatttctctctggttgggatcaccagttatcacagggaatgaagcaggagtcagagaaatggcagaatgttaagggaacagaatgaatcatgcatatttttaatgtgcactgtaaattctctgtattttattacttccatatacagtttatactggctgagctacagtaattagcactatgtactgattcatgtcataagctatttctagggatagttcatcactcactatttcccttccatatcttgaataccatcatttgggaagacatcagggaaccctgaagggtacctctccatgcaaatccccctttatacatcagataatgcctgagaaaataagaagtctctggaggtctgaatgcctcaccctcaagcacaactctgcagtttactctggattgtgttttgtcagggatagaggattaattaatcttagtgcataagaaaatgagtatcaatgaattacgacttatagcagtgagccgtggacacctcccatttgttattgatgagggagccaccacagaagtgatagccagcattcagggaccctgataggggacagcattcgtctgacaggtgtagccccccaacgatcttgtcatcatcatcactagtggggaaagtggctgacagaggaaagttgggaactatcagttaaacagattcatcttaaagtttctacaataccatgaaaagttttctcagatttaccaaaagagcagaacgttctcttgtctcacataatcaggaaatggtggctttaaggtaatttgggggggaaatttattatcccatacctttaaattgtaccccacttataacattataactatctattttttaatttatgctttaactttgataaatgcattctttttttaatatatgtactattcagacacacacacacacgagcgcgcgcacacacacactcaaagatcagaaactcttgacacagtaaatgtcctgaatatcacttcctgaagacacaaggaaacttttttcacagaactctgctccgcgccatacaattaggtgtaatgcttttcagtagtcatgctgatgttggtttgtggtcgttggtaggatgttggtatgggagagagagccccatacagtaacagaaaggaagctttaaaaaggcacctgaggctggttgcggtggcttatgcctgtaatcccagcactttgggaggccgaggcaggcggatcacgaggtcaggagatcgagaccatcctggctaacacggtgaaaccccgtctctactaaaaatacaaaaaattagctgggcgtggtggcgggcgcctgtagtcccagctactcgggaggctgaggcggagcatggcatgaacctgggaggcggagcttgcagtgagccaagatggcaccactgactccggcctgggcgacagggcgagactctgtctcataaaaaaacaaaaaaaaaactaaggcacctgagaattttctcgtctggaaggaaattagagatttatatttttgctctcctaatttctcttcttgattccagtctagaatttttattaaaatcattttacagagtattataggatgaccctcttcagcctttcctcttatcccaattatctttccaacacttacgaatttattcagcttttaaagtctagcccactttatatcttgtagctccaaaagtttgtgattatattttatgagccccattgttcagatatttttgatagttttaggaaagaagttagcaggtgtgtagacagatgaattgaatttatacctgcctaacttgagaaaatttagtattaagttttagtcttataaaatttagtagtataaaaggaaaactcatcatttttctattatattcatgatgaaatgacatgttactttacaccagagagatatccatggcaaaaatatcgtaaaacacagcccatagcttttattcatgagaaagaaaattgcttttccctttggctttatatcactagccctttagtgtggagaagatgcaggctctgacacctgcagcctctttaagagcacacgattagtttcaattattaactccaaattcttggaaaggtcaggataagcgcctccttaatctgggctatcttttccttctctctccttcttccttaatattacccagaagttgagagcaagtcctgtgtctttatatcttctaccctgatcacttttgctcactgtgaacttcctccaacaagtgaaatttaattatccacaaacatatgtattttgcactgttgtttcaatattttaagcttcttgaatacagagaacagattcaacattcattgttgtcttccagagtataaagtacaaacttaagtttatgttcgacatccgctgattcactcattaaaagatactcaccagcagctcccaggagagcaggaagatgaaggtcttcgtggttgctcacttcacctggacttggaaataggatgacacttttcttccacagccatttataccaacggacttgtcttgacattctggccacaggggccagaaaagtgatttcactggaaactcacaaatctaaatctaaattctgtgacagatgcaagataactcaacataaattctaaacattaacatttgcctacttttctagagggtcatgggactgaaagtaataagcccacctggtagaaactgtaccccataataggtaagtaaggcggagtaaggtcacaggacagagttacaggtgtccagattcccagataaaaaatcttaagtagttgggcatctcaactgtatatgtttattctaagaacgactgcacttttgaagtttcataatgtagactcttttacaattatatactttgtcttttgactgctctggtcttatatatccatgttagcttttctctttttaaaatttcaactcttattacaaattaaagggtacatatgcaggttttttgcataagtaaattacgtgacacccaggcttggggtcccaacaacctcatcacccaggcagtaagcatagtacccaacaggtggtacttcaccttctcattgttaaaggaacagcttgtttcccttagaaaaagaagattgctattaattgaacttataatagagaaaaggaggaaagttaaaaaatgctaataacttataattttcttgagcttataattatcttgagcttactgtacttattctaagtacttattgaataagtcagtaagtatgtagaatactgacatacacgtatgtcagggatattttaagtatttgcccatattaatttagtaatcttcacaacaaccatataagatacctattataattcccactttacagatgtggaaactaaggcacacaaaactgtaggggatttgaccaaaatcacatagcaaatacacggtaacatcagcattccaacccagaaaaatcttccttcagagtctgtggtcctgaccactatgaaacacttctctcagtaagttcaccaaaatctggatgccaagataatgcaaaattcttggacaatgataacatagctgaaatttttaaagtatttactatgtgtccagcactgtggaagtggattacgtgcatcaactcattcagtcttcacaagcagcatcgtaagtgttaaactacaaatttcaccatttaagagatgtggagaaagaggctaaaagaagtcaagtgagtatatcaaagtttcatagctgttaagtggccaatctatggttaaaacttaagcagcctcacttcagggttcatgccctcaacagtgatgccgtgaatataataagagagaacagggctgggcgcagtggctcaagcctataatcccagcactttgggaggccgaggtgggcagatcacgaggtcaggagatcaagaccatcctggccaacatggtgaaaccccgtctctactaaaatacaaaaaaaaatagccaggcatggtggcgggcacctgtagtcccagctaatcagaaggctgaggcagcagaatcgcttgaacctggggagtggaggttgcagtgagccgagatcacaccaaccaactttatcgatattccaagacctctgggaaacagcaagagtatgataggagacatccagacattcatcaggaggattcttcatttttcaagtatggcaaatattgttgctgaagttattcataaacatgccttcagagggaagtatgggatttacagacctcatctggttaaggactactcttgactttcttgatttaatagagttttactgtgatgacacaaagcactgttaaacagagctgcgttactcgaagaatgaaatactttcaatacaaccaatggataaattcttctctcactgtgcacattacctctcttggcctttttataatctaatttcttatcattcataatcagtccctcaaatactgactctcacctgagctcttctcagatccaacttctactgaacatgtctgctcccatacctagggtcagctagtctagcgctgaattcatcatagctttctctttctatattttctgtcagtgcaatgaagctacacacatatggttagccaaacttgaaacacagaagtcacccttaacttttttttttttttgactgagtttcactcttatcacccaggctggagtgcaaatgatgcgatctcggcccactgcaacctcctcctcctgggttcaagcgattctcctgccttagcctcccaagtaactgggattacaggcgtgtgccaccatgccgggttatttttgtatttttagtagagatgggattttgccatgttggccaggctggtctcgaactcctgacctcaggtgatccacctgccttgggcttccaaagtgctgggattataggcctaagctaccacacctggcccacccttaacttctttatccaccttgcttactacctgtattcaaagtcttgacgattttacctgtcttaaagatccttgacttttctttgaagatccttgattttcctttcaagtcaaccacctatgacttggttcagtatcacattttctctcctgaattattgaaatcgtgctaaaaccacttccttgtttgtggctttattctccttcaactcactctccacatcagagtaatctttctaaaatgcacatggatcattacattttccgcttaaaatgctttggtggctccacattgacatcaggataagtttaaattccagcaccaaagttcatgttcttggacactgtatgctgttttaaacctctgtgccttcccacacaccttacctggttaactcccatcattcttcaactctaatcgtggagaactctgaactccacctgcattctccaactaaagtcaggccttcctgaactttctaggcagctttactttcattacatttacttccagtcacatattacttgtataaatatctgcttaatgtctattttttccaggttgtttaaaattcctgagggcataaatgatgtctgatttgctcactattacacttcaaagccggtatgtacgtggcacatagtaattgctcagtgaataactgctgaatgaatgaatgaggttactttccctctttgctggtgaacttctagtcatccattaaatttacctgaagtatcatctctatctataattaatctctgacattaacctatgacctcccctaactctactgccataatgccccaattggttagatgctaatccgttctatttcttatcggtgccattttgaaaccctgtgcatgttgctattataacttttgaattttgttgcaggctttgatttccttttctcttcaactagaatatgagcttctgaagaaaatattgtatgttaaaatttccagtttatgacactgtctctggcatagagtagatgcttaagttcttctgttcttctttgccccattgggcacttaagccttgtccaaaacatcttcaccaacagtcatccagcctctattctggacaggaaaccacaggaccttctggaaacttcttccttctgtcgagctggaaaatcgtcttgttagagctttgactctttttctctctgtcctatagcttggggacataggatcaggagagagatagtaagaagataagtagacaacaaagcgaaaagaagattgtaggttctaaaatagttaaagatgagtcagataagtgaaaactccagcccagcaaatatacatttttctctttaggtagcagttacaaattgtgaaaggaaatcaaaaaagtgtctccctgttactgggaaatagcatgccaggtagtagtagtcaaagctaatgctggcttctttgtagacaattcagcagaaatagtttcttagaaaaaaaatacttggaacaggattagatagattgccctaacatctggcttagagtactctccttcaaaaaaccttctccaattgcatcaatccccaactgataattggttttctatatagtctatgaatgctgatgagaatagtttgggcccgattatttgatggtcagtcaaatatcatatagtgattttaaaaagttatttcttctcaatattggctcagtcacaccatctagaatattcacacacactgaaaaccaagatgaataacctgtagtttttttttatttgtatggatttatttccccctttcacatggtacccattgcaatcagggtccttctatatatttgtaaacccggacaaatcaagtacaaacaagctcattagctgcaaccaccaccctgtacactaagaagatcttcctgaaaggtcctgaggtcttccctgatcatcgcccatgtcagatgcctcaagttatgcaataaacacacagcgacatgaaatacagaggactaacgtgcatttctttgtatctgtgtagaagggaggcctgttggaaggtgacagagaccatgcagcatgtggaaggtgtctccccaaaagtggggtggagtcaaaaggggatgaggaaagcagcctcctgcagattgtggaagccccagcagactgcaaagggcacccgtggggcaaggcatccctcgtgtggtgtgtcagaaattggactgaggtgaggagagtttcaacatgggtggtctccatggcacaggaagtcagaacttgaacggagagaggtggccatttacaaaggagagatgatggcagccacagcacacatttagttacctgtaaagggactaatcaaatatgtaaatctataaggataacagaaccatgtttctcagttattggataagagagttgcaaatatggaaagagaaaacactagaacacaagaacataagaataaaccttataatacgggattggaactagtgtgaactcatcgcttctcaatatgtatagacaggaattaaagatatctgtaaatatatgtgtactgtgaaaacatatgtgtatgtacagctctgtccactgtgatacctaagagtagttccccccaaaagcaccccaaaagatctagtatccatattctgttttctaaataccactgtccactagaaggaaccaggactttttggacatatagtagatacaaagacaggcaggaaaagcctagaaccccttgtgccataaagtaaggaaatgctgaaagaatgatggggaccctgacaggaaggagaatttaagaattaacaacccctctatttccgtatcatctttgcacaatgcttcatcaacattgaaagattattattcataaataaaacctttgaaataaaaattgtttttatcagttacattccagccttacatactgagactatgacccgatttctgtagatttgcagatacaaatataccaatgccaaccatagcagattagaaatacaatttttaagtgcttagacctaccttttacatatgatttttactgttttccattccatctatctattcattgaccaactaagcaaatatgtattaagcacccgcactctgtaaagtattttgacagtggccatgaaccatgtaagcttctggcacagcagcctagtgaagtctaccctgcttggcttacattgtttcggagctgggtagacagttggggaaaattatttcagcctctccccacaaccagatttcaagattgaggcaataagaaggtcagtagatgaaatgatttaggcacctaaaaccctttaaccctcctaaagcataccctgtaaaactttccaaattagatgttatctctaaacatgtcaaacatgtctttctttttttaagatggagtctcagtctgtcatccaggatggagtgcagtggcacaatcttggctcactgcaacctctgcctcccgagttcaagcgattctcctgcctctgcctcctgagtagctgggacttcaggtgcacgccaccacccctggctaatttttttgtatttttagtagagatgaggtttcaccatattggctaggctggtctgaaactcctgacctcgtgatccgcccacctcggcctcccagagtgctaggattacaggcgtgagccaccatgcccagcccacgtcaaacatgtcttatagctcctgtaatccctgaagcactttgagaatgtgaatattattcacaaaagctgtttgaacaaattaaaatggcccatgtgcccatgagagttggttttattcactgttatattcctggtcctcaaacagtgcctgacatatagttatgtgttccataaatacctattggataatattattttgatatcttaagtgtgtatatggaggttgttggaggcatttcaccagtaggtggtagttagagttgctaaacctttacttcggcgtttcaaatgccttcttgttttgtgcattccctgcggaatccctttgtattctattctctcaatgctgtatcaggaggactgagggcagatggctgacatgagggcaatgtgcctctttcacctccaggaggagctacgactttagtgaaattcctgagtcatgtggagggagaagagaggcaggagggaggaaaggactaacgaaggaatcaaatgctctggtatcagggtttgctccttgttgtagttgagagaccatgtgtggacaacttgaagacactaaagtccattccacctggacctgcatctctgcagtccctctgctcatgcccttagggcctcctgttattctagtctgtgttcaggtcctgcatcctaagtaggtgagatgctccctgggggtaggggtcgcagattatttctctcatgtcccctcgagcacccactgaaaggtgcttcctccctagttggcattaccttactgggtcttaaaatgatgcacagctggctccagggaagggctccactgagctaggtgaggtgtcctcctggaattcactgagatgagggaggggagctggagtgtgctcatcctgggtccaagacaggcatcgggaaggcatctgcccaaagggaaggggtctgtgtgttagggaggaggggagccataagtagaaagaggaaggggagacccattcattcgttgtgggaagggcaggcagctgctaagaaaaaagcaactgtctaaagaacccgccctgcacacctggccctgagaagctagtctaaacccacctcttgaggtgccagtgccaagcttggaaaggaaagaggaagtgtgagctgtagacactaatagtgacaccaacaggagcagagacttcccaagcagcccctgtctcagggccagggaagcacacccagacgacaaggacacagagcagggagacacagggtccccctgcctgtgccccgggtgaccctgccatgggctgaagtctccactgtggtgtggtccattgtctcaggtgagtcctgggcacaggtgggacatttctgtccttaaattttttgcttttttcatggaactgcttcagaagattctgtcctaggcttagtctgaatttggcttcttattttcataggctccatggatactggaattacccagacaccaaaatacctggtcacagcaatggggagtaaaaggacaatgaaacgtgagcatctgggacatgattctatgtattggtacagacagaaagctaagaaatccctggagttcatgttttactacaactgtaaggaattcattgaaaacaagactgtgccaaatcacttcacacctgaatgccctgacagctctcgcttataccttcatgtggtcgcactgcagcaagaagactcagctgcgtatctctgcaccagcagccaagacacagccctgcagagtcaccgcctccctgtgcacaaacctcctggatctaatcagaaaaccgtgggggcaacgcatccagctgagcctcagcactcggttcagcattctgtaagacctcagcagacatctcagatcataatactgtcatttattggatgtggcaatgctaaattgcccagactcctgcagcctgtggcctgagtttgtcttgaatgagactgtgcctgaacttgaatgtaggacagatgccgtcaagtttaagtttttccaagtatctttcagtcggtttgtgcctctgggaaatgttgtgtgaggtatttaacactctggcctcaccaatccaccttccaatatggactgttttttgactttcttttgactcaagttagacccggatctcagccctcatcccagctccaaatatgtatggtcagaccttttcttttcttttcctttctttttttttttttttcttttctttccctcccttcctccctccctccctcctttctttctctctctctctctctttctttctttctttctttctttctttctttctttctttgtttctttgtttctttctttccttctttcttttttgagacagagtctcactgtctggagtgcagtggcgcgatcttggctcacttccacctccatcttccagattcaagcgattctcctgcctcagcctcccgggtagctggaactacaggcgcccagcaccacgactggctaatttttgtatttttagtagagacagggtttcaccatgttggccaggatggtctcaatctcttaacttcttgatttgcccccctcgggctcccaaagtgctgggattacaggcgtgagccaccgcgcccggcaggtccttttctttttctttctttcttttttttttgaaaaactaaagaatacccaatcccctcctcaggtggctctatcactgcctcaccctgaggacagtatttccccatggggtttggatcactgttctctagttccctctccctggggcatgtgcagagtttcaacttcttgttggctgctctcttccactcaggatttaaaacattcacacttgattctttttccttctatctctgtaatcctaataccaagttttcttggcattcattatcagccgtggaatctgttgtacctgaattgttactcacagcaggtaataagagaacaagacctcctggaatttctgagccagactttgtactcagggttaccttgctgacccccatattttccagcattgctcttattaattaatggccctcagtcctgcacacaccatcagatcccaggggctgagcacagcctgcattgtcaggttctgcaacaacacaaaggctccctcctctctcctatagagggcgctccagggatggtgggtgttgccagagacaccagtaattctgccagaccttgcctgtggggccatgggagctcaaaatgcccctcctttcctccacaggaccagatgcctgagctaggaaaggcctcattcctgctgtgatcctgccatggatacctggctcgtatgctgggcaatttttagtctcttgaaagcaggtcgatgcttagactctaggaaattcttgctttgaacttacctaagacaattctaaaccattctcttaatcttcttcttttctcacaggactcacagaacctgaagtcacccagactcccagccatcaggtcacacagatgggacaggaagtgatcttgcgctgtgtccccatctctaatcacttatacttctattggtacagacaaatcttggggcagaaagtcgagtttctggtttccttttataataatgaaatctcagagaagtctgaaatattcgatgatcaattctcagttgaaaggcctgatggatcaaatttcactctgaagatccggtccacaaagctggaggactcagccatgtacttctgtgccagcagtgaagccacagccttgcaaagacaactccagcctgtgcaaaatccctcacagagctgcctccctcccagccgccagctcccacttcctgcctaagaaaaggaagtctctggttgggtttgttcttgcagctgtctccaaatagacagatatctgaaattaaattaccaaaggtatcttgggcagaaatgaccagacactgtaggatttgaagaatgtttacagatactacagagtgtgagtgtgatggtgggctctgaatatgagagaattgtacacaaccaagtaacttatatcttctcctcattcccatttggccatctttattagaattgttttgttttagttgcttaggaaaacatattttaacttctagggtggcgagatgattcctgagtgggagttcaggtatttccatgagaatatagagggtgctcacagaaatcttcagaagaaggggcttggtacaaagaactcaattatcaatgactcttgctcagcatgtggtcaagagcagaactatctgatgaccctgtgaacctggtgtgatgcatttgggctaatgatgctagctcacaaaataacaagttaagagagtagaaaacatggagtctaatatttcacaccatttcaaggtcaacagagttctagaccagcatgagaatcgccagaataaagcaaggcagtgcaggaacagaattcagcagcaaaagtcaagagacacctagaggcagaggcaggaatgaatttgtcactttcaacttaacctgaagcagccagattaacttcttgagtttcatttaagaaattattcctcttttaaacatacctattgaagtctaaattttaggtattttatatatttcagttctggaatttccatttaaatcttgctacaatttccagttgtttgctaaaattgcacattttgtcatttactttgttgactatattaacatctgtcattttaaagccactttttgataactttaacatctgaatctgtttgggtctatttcttttgtctgttttctctgttcagtttctgggcacgtgattttgttttctcatacaactagtaatttacttgaatgccggatattgtatataaaaactatagagataatttgaggctctgaatgatttcatcttcctcaaatgattcacttttgcttctgctgggattgtagcaggggcggatcaccttaattgagctgatgaatgagctggatcagacctgagcttcagcctgcatgatggctgctcgcctttgctcttagccatgtaagttccaactagatgtctgaagtttaacagctaaatcaaattgtaaattacataacataatatttgcccattgcaagcatgcaattcaatgaattttgataaatttgtggagttgtgcaacaatcaccatgatccagctctaaaacatttcatctttccccacccggaaagttccttcgtgctcattttcagtcaatccctgcttctacccccagcaccaaggactggggtctttgccaggctcctctcctattcagtagtcactgaacgtaaatgttctccagaccagaaaggtggtggatgctcctcaaagcctgctacactctcagtcttcccttttcttctcagctacttagccaacgatataaaactggcaaatgacttaaggcgaaagtggtctgttagatctctcctttctcgttgagatcccaatcccttaagttcttactgcctcagtagctccaagtgccttcaaacgtttatttttatattttgttaagtttttctagttgtttttggtgggagtgttgttctgcaaaaaatcagtctattaactctgaaagccagtttctatatttattaaaggtgaggtgcaatgttttatgtttttattttaggtagaagtatcttgaagaaaggaaggagtgaacctctctgccttcccttttttttttctttttgagacagattctcactctgtcacccaggctggagtgcagtggggcgatctcagctcactgtaacctctgcctccggggttcaagcgattctcctgcctcagcctccggagtagctgggattacaggcgtgcaccaccacacccagctaatttttgtatttttagtagagatggggtttcaccatgttggccaggatagtcttggcctcttgacctcatgattcgcccgcctcggcctcccaaagtgttgggattacaggcatgagcctccattcccggccagattatctctatttctaagagttctattagccttctgcctttggtccaccatgggacagagtcttgacacgtttgaccttttaccacaaggaggagctgtgactctactgagattaagggaactcagaggaagggcagagcattctcaggatgggagacagttaaaagaaatattgggtttatttacaacaggggaaaatgtggtctgcagaagctgtgttaatgctgaaatgtgagaggataaatatagactattcatttgccttgctgtgcaggtgcttttgatctagcaaagagcctagactgccagatttgttgcatgtgaacctgcatgggatgagaaagggagagaatttgagctgggaaagagcagagctcacaagcagatgccagtggaggaactcttcctgagaggaataagagaggctctggatgctgggcctcttctccagttcaatcctgccatgaaatgacttcctggaacctgggcagtgagcctgacaaatcagggcttccttgagggatcttgcaaagagagtaattaccaagggaaatctacctatcagaccaaagaatacctggagcaccattctcctgactctaaatgatgaaaaacctaagctagaaagggtttttttttttctttttcctcttctgaatgttcctctaagttcttggagtgagggcttcttcgaaggataggaaacctgtctcctgggtctgagctaatggttctatcaaaacagcctcaccagactcccttccagcttccagcttcaatatctatccctgtctaccaagacccatggaagctagacttgtccagatatcaaaagatgatgccaaacacctggagatgggaaagaaggtggcgtggacagacctccaggatgcacatctgaaacaggctcttcattttgttttgactacagcctcctgtttcgccttttcaaaaagcatttggaatttcccttacttcttggaaatccaaaaatacagcaaagatacattttctataggctctagttattcagtaggagggagcttcagaatatctctatactctactatgcatattctagcatgctgcccggaagtgaaagtctagccaaacagtttaacaggaaaaccgttagctgtcctgtggaggttaattttgcagtttattttggaatggaacaaaagaaggtattgaagataggaatctcatttctatatgctagaatctaaatttcttaactttctgtagtatgggccattttcaaatcagctaaagtcctaaaaccagactatgggaaacacacacttctaagctcaatattaaatatctaaagtgactaactaacgtagggttggagaggcagggtccccctggacttttcaaactcctaccctcacaaaaaatctagaacttcttctcagtaacaaaaataagatgacgtataatcatttttcattgttaataaataatctctatccatcatggcattgcattgaatttgtgttaattgttgctaaaaaatgactgtgggttaaacatttgtgattcatataataatagaaataataaatgtaaatgttttaagtgaacaagtgagattttaatagctcaacaggcaaatagcatgaactgatgctctgcaaaggtgagggacacctggcctgagacaggatgtcttatctgattttggtctgaatttcatttggaaaactggcagctgctggtcaacctgcagggatatgatcccatgagctgatatgcaatgttgacttttgtatttttgtcagcatgaaataatttttttttttttaaatcagggtcagagtctcgagtaactagcagccagctgatagaatggaagtgaaaccatggccctcgtccccttgcaaacctggaaacccagtgttgagcatgtgtgaagagagaaacagaatcaggtgaaatgaaatcttcctaagaccctgctcaggaaactaaatttgacgtaattggacacaagaagttgttcatccattctattccgccagaggagacaggacagatttcccgtgcgttcttgggaagctggaagagggagacagctctgccaggtggagtgatattctcatgagaagtgaaaaagaagaggcagagatggagagtttggttctagaagggtggaaggttttgcttataaacatatcaacacacttgcttttcccgccaagatgcaaactttggggaattgctcaaatataagatggggtttaaatattggacagccaaaaatatgacccatgttcaaaatatgcatcctggtatcattcagttcgacgtgttctagttcttctgcagctttctgtctcattccttttgcccctacaactctccacctttttgtggattaagttatctccatgataaaattattatgttgtcttccctctttgactttcttgtcggcagcctggctcttcccagggatcccagcgtctatcctctctcctttctgtagcttttttccgcttctccagtatggcgggccctgtcagaaaatacgtacataatcaatttatttgtccttcttatcctttggacaattcttttgtttgtttgtttgtttgtttttggttgagaccaagtctcgctctgtagtccaggctggagtgcagaggcaggatctcggctcactgcaagctccgcctcccggcttcaggcctgcctccgccttcctagtagctgggactacaggcgcccgctccacgcccagctaattttttttttttttgtatttttagtagagacgggtttccccgttttagccaggatggtctcgatctcctgacctcgtgatccgcccaccttggcctcccaaagtgttgggtttacaggcgtgagccactgcacccggtctagacaattcttgatggacaatcaaacacttttgcttttcatatctcctgtaaaacacaaaacaaaacaacaaccagaactaacattgcctcatatgaggcgagtttctttctatcagtttcattccagtgcctctcccagacgctgtccgtctgatttggtaaaaagtcttgcgtaaaatagtgaaatacatatttatttaaagtctactctttaagaatggttacatctttacatagttatgatcatcaccattgaatgtagcctcttgtcatttcactatcttccctccccacccgttccttctttgaaaaggttcccatgtcagctgtgtggtgcaatgtggtaggtactgaataagacccacaactacgggggtacctggttatgttcacagaattgtagagctagacagagtgttgaaaattatttatttctgcccattgtttcatagatcaggaaatgggatgctttaaaaaaagtatttaaatgtaaatagtaactattttgctggcctccatgtaatatgtatttcatattcttagtctacaagtaatgtgtgaatgtgtttttgctcctattggattataagcatcatgagagtgagaatattgtttactcatgctttgcactaagtagccattcagtgactataaacaaataaagcatgcttgaagttccaagaaggatggtggtcatttttcttttgtttagttcaagttctgtgtttagtaaatcacaaatgaaccatcaaggtctgtctttgcaggggattcaccagtagatgacaacactaccaaagtgtgtgtgtgtgtgtgtgtgtgtgtgtgtgtgtgtgtgtgatacctttctggcagtgctggtctctggttttcctcctggaggttcctgccctggggccattgactgaggcactgaggtctgagtgctggaccttgctgacaagagcaggaggagctgcagccctgccacacccccgaggttgggtggttgatggctggcagaggagaggagtaccatgggcaagaataaaggggactgtggtcctcaacattagataattcacaaaacgcgaaggcattttctgtcgtcacattgccatcaggtgggtagggcccaaggatgccgccaagcatcctccctacacaggacagctccccacaacaaacaatcacctgatccaacatggcagtagtgctgaaattgagaaaccccgcaataagcttcggttgtaaactttgtaccaagaaggagaattctctgcagacaactcaaggggcaataccgtcaactacttttgttttctctgactgccgtgttgttgaccttcatcgccattctttcccagcacatggtgtctgcatattttccagcagcctcctgtttcctcataaatctgccccttggacagataagaacatcacagggagcagggctgcagttcactcccaataataacgcctcagcagggtttgctctgcagtagcatcacagtcatgtggagtaggtggctatggctggtattcaggtgaaatctcaggccaatctctcctgaatcaaggggaccactgatcattaatgagaccttcaagtgagcaaagattcaagagagcaaattaatgtcctgcgctattgtgaagggacgcaaaggatccagagaggaaaccagctgactctgagagaagggcctgaaaaggagaggaagggaggaggtggtcagatccccgggaaggagcagggagggagggggctgctggcccaggaatgactgtcagagacacatcctggaggtcacaattccaccctctcaattattcccagaaattccaaaaactcctttaaaggagcaagtgcagggcatgaaagggaggagccatgctagaggagaccctgggaatgggggaatgattacaggctgtgacctcactggcgcagcacctctcagcggcagtggaaaccacagcctagtcctctcaccactgcagaccagaatcctgccctgggccttgcctggtctgcctcactctgccatgggctgcaggctcctctgctgtgtggtcttctgcctcctccaagcaggtgagtcccgggcccaggtgacatgatcctattggagtccctaagccttttcaccatgacaacaacagcaggccgtctcctaggatttgcctgaattctgcttctttcctttgcaggtcccttggacacagctgtttcccagactccaaaatacctggtcacacagatgggaaacgacaagtccattaaatgtgaacaaaatctgggccatgatactatgtattggtataaacaggactctaagaaatttctgaagataatgtttagctacaataataaggagctcattataaatgaaacagttccaaatcgcttctcacctaaatctccagacaaagctcacttaaatcttcacatcaattccctggagcttggtgactctgctgtgtatttctgtgccagcagccaagacacagccctgcaaagtcactgcatccctgtgcacaaacctcccggctcagccaggaagctgcagggcagcgtgtgcacctgcacccagggctccagtctccattccctgatggcctctgatggagtttcagtctgtagtacagccagctagtgcacccagtggagaagtcctccatcttatgcacacaaaagtctcacagaattgtttatcagctagagcagggcttcacaacaaagccactaaagtattagggctccacaaacaaaaaagagcctgtcctatgcactgatgatcttaactgatgggggaagctctttcttttctttctgtgtggcacatattggtacgtattttatataacattatgaaaaaaacacgattgctgaaaatggttgatgagcacaagcataaaggagggggaaggaaatatttccaagatcaagagacaattctgatgatcagtgagtactttattcaacagaaaaatatttggagaggcatgaaattccatggcaataggtaaactggaaagtgttgaggagatgccggtggaggtagccttgtgcgttgtgggctccttctcttcaagaagggtgaccagcaagtgtctctcccaattctgatgaatatcatcttgaactgtcctcaacagcaggcaatagccagatgactggggatattgggagacctgaaaggactttggacacaaatctctaggcagtggtgagccattggtcctactccaagtgaaacaacatgatgaaactgatattttggtagaggaacactggtagtagtatggatcagaaaggagatagatttttgggtggcatgaatgattaggagacttctaaatatcctacatgaaagattagaaagggttgatgtgaagcattgtggacaatataggcttgaggctctgcattatgttatttcttggaaatgtattgggttttattctgggagggttgaatgtaggacttgctagggtctatttcagccttgccctccctcttagggagccccagcatgtggtcatcattgctagtgcatggcctttccagggtcttagtgggaatcacagtcacccaccacgactctccactctcactgggtctgaatgccattgccttcctgccctgggtatcctctgaaatccctgcccgtgtctacagccttccagagtttgttctctgctgggccttcgggagtgccaccctctgcatacacaacttaggacctggcccagaaagaaaaataaaaaatgaaaaaagattttcttacacaggttctcagggctccttggtagtactctgtgtcctaaatcccagctgtcttggagtcagttatgtcctcttatcttcaatcacatatactacttctattttatataaatatgtttacttggcttttcttcatatttaccattccactcttcactcttcttgcaattcacatggtcctgagatcattttccttcttagatccatccctaattcagaccacttgaactcgctggtcaccaccccttgttgtgggaaatgcttatgttagctgttgtcctcaggacaattaaacctttcgctttcaccattattcaagttttcagtttaaattctattgctttttttaaattgtctttgcaatttggtttacttattgagagccaaacaatgcaataaaattttattcgttcaaatttgttctactttgtagaagggccaaagtgttttcttgctgaagtagataccaatggaaacaattttaatggtaataatactagtgtttaaaataaggctaattttaggtttttatctagtgaatagaatatctccaactgtagcaggatagagatcgatcctatatgtaacctgttgagggggagaatactcaaccccattaaattctaatctacatgctttacattttttgtttgtttgttttatgggccacattgaaaatctgatgaaatttttgcattagaagaatgctacaattttcctcctgactgagaacatccccaggttaaaacaaatctaaattataaatccttgacttaaatcatggataagtatcttccctcagccccatgtagatttacatataacatagatttacgaccctaatctcatgcctacaattataattatcatcatgaaaaggtaacactgatgtaatacaacaataaatagatggtaaaaatcactttgaaagtatgaatcatctcatttttgtgtttatttgtgttcatttgtatctccaaatgctctagaatgaaaagccaatattggcataaaagtaccttttaagaaaattgatgatattccaattcttaactggtcacaaagcataaatagcttatgcagtgaagtacagaagacccataggaagtcatccagctggttcctagttggaaagttctccacagaactgatgaactaatgtggtttctaacatcttagaaatggcagggctttagagatcatctcatttcagttctcctgatttaatatatgaggaaatatggcatcacatatatgaagtgattgaacaatgacatactgattacatttctcaaactttatgtaagatatatttttattctctagttgttttctgaatatgttgaattgccttacacaaatagaattctgggggtgaaaatgttggtgattttctgcttgctcctagctgttgctcaaggagtatttgttgaacaagtcagactggcccaagaactcaagagggctgggatactgtctgttctgcacattactagagatccaggcatagacaattttctgttcttttttcttttctttatttcatttcatttcatttcttttccttttttttttttcttttgaggtgtgtggtgggagcagggtcttgctctgtctggagtgcattgacacaatcatggctcactacagccttgacttccatggctcaagcaatcctcccacttcagcctcttgaatagctgggactacacacaggcaccactacattccgctaatttttgtagagataaggtgttgccatggtgcccagacacagacatagacaatttctgttgagtaaaaatttagaatgtcttatgtgtgtggatacctggcgttctggctgctgactctctgtgttgttgccaacacctccttcgtcttcattctcccctggcctttcaaacccttctctgctgctcagggttgtgagatgtggaacccatctggatgctgacactgggtcggtgagtggccaaatactgttttggccacaggcaggagctgtgctctggtgaaacctctaaggcagggacctggggaagggatagagaataagaggagagatgggccaggagggatcttgcccatggggagccaaccgtgcctcaactgagagcatggctgtactcagcccaagcacactaacatcagcttcaagctgatttccctttcctttgctccacacaccttgtgttgttctttttcagcatcctgtgtatgttagctctaagcccagccaagccccatgccctccacttcagggacagagggtggctcatcccttttgtgctccctcagctccctccccagtgcctggtggctggttggcaacacagtcatgcccttgaatgatgggagctggtgcacactgcatccgtgttcatgcagtcaccctccctccacagagccgggcagaaagggctccaccacacttagacattgagggaagggacgttttgaatggcactgttttatgtgatcccgcaggacagaaggagatttcttgaatgggagtggtctgttgttgagagggatcctgaaagacagggagacaaagatagagggaggatccacataattaggaagcagctgagagcaaaggagcccctgccagaggaatatccttggggggtaaaaagccagctctgccctttctccccagccgattcatcctagcccagcaaattcaaatctaccttctatcagaacttagaaaggatgtaaagcagtcaggaagaaacatcccctgggtctggggaaactatcaggagcagtgacatcacaagaaaaaccaccaaccagggccaaggagaccagagcccagcacctcgcccaaaggaccccagtcagaggccccatctcagacccgaggctagcatgggctgcaggctgctctgctgtgcggttctctgtctcctgggagcaggtgagttaggttgaaattgtctgtccttggactccaacccttttccttgtggctgcaggaacaaccctcttcctgggctctgcctgaattttgtccctttcctcctacagttcccatagacactgaagttacccagacaccaaaacacctggtcatgggaatgacaaataagaagtctttgaaatgtgaacaacatatggggcacagggctatgtattggtacaagcagaaagctaagaagccaccggagctcatgtttgtctacagctatgagaaactctctataaatgaaagtgtgccaagtcgcttctcacctgaatgccccaacagctctctcttaaaccttcacctacacgccctgcagccagaagactcagccctgtatctctgcgccagcagccaagacacagccttgcagagtcaccgctttcctgtgcagaaaccttcggggcctgccaggaagccgtgggggccacggagggctcgggtgaacatttcctccaagagccccgaagaagcttcagaacatcatagcacctgctaattcatccatgtggcaactttacatcctatgacatatttagagtgtgggtttccttttgcctgagtgtgactctgccccgtcaactgatttgaaaaaagagaaacatattcagatctagtttaaaaaaaaaaaattttttaatcatgaaataggccgggcatggcggctcatgcttgtaatcccagcactttgggaggccaagacgagcggatcatgaggtcaggagtttgagaccagcctggccaacatggtgaaaccccgtctctactaaaaatacaaaaatcagctgggtgtggtggcatatgcctgtaatcccagctactcaggaggcaggagaatcacttgaactcgggaggtggaggttgcggtgagccgagaccgtgacattgcactccagcctgggcgacagagtgagattctgtctcaaaaaaaaaaaaaattcctgaaataaagcaagcatgctgtaaggattgtgtagcttaaaattttataagaaccctctaaacaatcacctgtgtcaccacagaggcacaccctgcactgggtcagacactgtcctgtgaggagctgtgttctcctgacacttcatgtccagtggtttccatgactcttctttggggccaagggttccctttcatcataggttgttgtcatgcagagtcaagcaacactgagcactgggaaatcagagaaggaacttccaggcaagggtcccagtgcagaagccagctagagaggacagtagtagactcaccctttgggaaatatgtttgagaaatatgtatctattttcaccagttctattactctatattacagcttgtctattctctaatttctcatttgtacactgaaagctagactgtgaattctagccctgatcaaagctccacatatacacagacaccttctctgaaccctgcaggcagcaaacttgcctctgtctgctccccttgctgcagagtccatggatcatggtctagaagtttcctgactcatccactctccttctcttggctggaagcctccttgttggtttcagatctcagcgcctccctggattgcctctccagactgacacttgaaggattatttttccccctttggtctctttattcccaatgtgttcaatcatcaggctcagagcctgatgcctccagagcgcagctctacattagcttttagagaggagagtgggtcctggctgttctgtttatctgttttcattcactaattcattcattcatttattatagagacaaaagattccctatcccaagatatatggtcatctgtgctgtatcaaaagagaagatattcttctcacagttttatgaaatgaggtagcttcgcaacttgcggggagcagcctcttaagttagttgtcaaaattaggcttttgcctaagtaaagttaggatcctaaattaggctcctactctcccacaaaaactgggagacagggcctctatcttccttgacgattgtatctcaaaaagatggttcctagagtcttgggaaagacattcctgggtcataaagctggctagaggtttacagagattttaataggattgtcaaaaagccttttctgtgtttattgagatgatcatctgggtttgtttttagttctgtctatgtggtgaatcacatttgttgatttgtgtatgttgaaccaaccttgcatcccaggaatgaagcctacttgattgcagtagataaactttctgatgtgctgctggatacagcttgccagtattttgttaaaaatttttgcatcgaattaaataatttttaaataaggtgacttacattaattgctttttaaatataaaaccaattatgcattcctggggcaaatctcatctactgattagatattaacctttttatacattgtgagttaaatttactttatttttgttaaggatttttgcttctatgttaatattagtactatttattcttcacaatttgtaaattgataaacttgctcaatttcatcaataaagtaagctgggcctggagttttctttctggaaatgcttttaattattatgagttcaatttttaaaaccacttctacatgtattttttaatatccctatggacattcaagttatccactttttgagtgggtaattgtgttttttggggaatttgtttattttgtctgcttttgaatttattggcataatattaatctttcattggagttctaatttgcatttctctaaggattaatgatgttgaggacattttaatgtttttattaccatttgcagatatgtctttttcatatacctattaatgcttttgcccagttttaaaggttaaattatatatcttttatattgatttataggaatcctttataaaatataaaggatttttatattatatagaatcctttatataatctggatacaatattctagtctgatatatgtattgtgaaactttttcctcagtctgaaaattttcctttccactttcttggtagtacctgggcacaacccctatgaaatgagagtacccttctgtctcctttaattttgtctctctaccttcacccttatcagtatttggcaggcaattaattcagtcagattgagagagtgcaaaggcttctagctagccctcacaacactggcttgggtacacctctaatctccaatcacacgaaacaatttgccagcccagaagctacccctgctatgtattctaccatgagtagaccttaaatgtgcacctcccactctctccatagtacatatggtagaatggtgatggatccttcttttggcagactttccacaatgcatggagctatgcctatccaagcacatctctgcatggacaaaggaaggggtggataattgagtcagtgtttctgcttcttgcttgtgagttttccccagtaaatcttgttttatgtgtatattgcacagggctagtgctgtctacatgtcccttcatatgatggtgctctcacagaattctgaggctggaaggaacaaacaaaagttctcataaagagaaatttaatcacctctagaaagaagtccgtgcttaatggctttggagtttctgtgaagaaagggtttcctcctgccttagaaggtgggcaaagtgagcaacatcttcaccaagtcaggaacacttgatttcagccagaggcagaagtggggttctatgataatgcccgattgtggttacagagggactacatgagcaaggccatggaggtgaaaatggattcatttgggctgaaatcctgtaaatgaagtaagcgggaaaacccagcgcacattccaatggaagatgcagcttcctaatattgtgctttcaacttagattctgtcatctgtaattactccacacactttctcaaatcattagcacaactgtgggccaggtaatcatttagcccctttgcttggtacaaggtagccatgctctctacttagctccctatttttctctgggaagcttttgctgagacctgcagtgaccatgcttctcagacttctctctttcttattgtcatttccatttatattttaactttaattgtagtttatttgattaacatctgacatgtttatgtttctcttttgcttatttgacctcacttaatgataacccaggtaactggtcagctgctgctaatcaagttatattttctggggttacattggttattttttcctctaaagtttctatctgtgtaagaattgaggtagcagaaccttctctctcttttttttttttgagacagagtcttgctctgttgcccaggctggagtgcagtggtgcgatctcgactcactgcaagcttcgcctcccgggttcacaccattctcctgcctcagcctcctgagtagctgggaaccttctcttttttggaaacagggtctcactctgtcacccaagctggagtacagtgatgcaatcatggctcactgcagcctcaacctctgagattcaagcaatcctcccacctcagcctcccaagtagctgtgactacaggcacacaccaccaccactggctaacttttttgtttacatttttggtagagatgaggtcttgctatgttgccaggtttctctcaaactcttgagctctggtgatcctcccgcctttacctcccaaagttctgagaatacaggtatgagccaccgcgcttagctcctcctattgatttctgaaatttaaatggagatcagactgtctccacgcaaggaggaagtcagacagggcagagcttaaccaatgtccacggtttgttttctcactgcagtcttggacttaccactcatctcttcattctctggctcaaaatagcttcagtcttcccagaagattctcatgattttcagtttgtttctggtttcttagttatttcttgtctcatcaggctcccctgaggaaggagccaggagatgctacaagtctgcaattttagggggagtcagatggagtgcactggtcttttgcacttctttataatattatctaagcctcctcttctttgaaatataatggctattcatcatgggatatgaggcatctcagaagcaatctaaatatctgtttgtttctttttctagtaaagaattgaccagtattctagcaattttattttaggtattcctttaaaagtaaaaaatacatagtttttcttaacgtgacttctattgatagtttatatttttatgattttgtgtagtagctttaccttccctaggatcagaaaccacatcagataatcagcttctattatgaaagaagctgattcttctatttggagagtgaggtatgcagaaaatccataaaaggtattaagttatagaacaccaccatctgatccaccatctgatcttgagagaattttaactggtttatatccatgaatactccctcagtagggtatttttgttctctggatggcatcttggaagaggtactggtcattgatcatatctcactggcacattggctagtgaccgctaatgtcacatgcagctggattggaatctcttctcattgctttctcatggggtcatttgcctttggacttaaaaatcaagaaatttcataatgacaatatctagatttactgtatatatgtaactattcttaaaatttgataacagatatgtcaaatgtagatatttaaagaaatttggattggaaatacactaaatcagaagtagcaagtgaaggatagcggttctgtaatggaatctttctcagattctgttttccctagtctcatgtttcttttttaaacccagtctggcctctccttcttagcttactaagtatagaaccacaaatagaaacttagaaatttaatcattttctgcacatatctttactcatatatgggaaaatgggcaagaggatattgtcagtgaactcaggcaaaaagaggatttctaaaagagagagtatagatgggaaagaaacaaattccccagcagcatgggaacagtgggtactgttttgtttatttttggataagctgattagttggcatgtagcacagagtggtctgaaaggtcttcttggagcaagctggctggagtcatcacagaaaaaagaactttaataataaatcatccacaaatccctgagagtctgcctgccgcaagggagacgggatgacttgatgtgattctggcacagttcttcctgcagcacacctacctgagctaggccaggtttgcatcatctccttcatcagcattttctcaaaggcaacatttcttttctatcacttttttcccttttacagtgcaaaaagtgatcttgaagaacataaattttaaaatgtgggggtttcttttagttcccctagagaaacagtataatagtcaagatggtgaaattgttcctaatttaaatatgtcccatgtctcttgcaccatgttagaaaggctgtatccatcagctcagacagccacagcaaatagcacagactgcatgggttaaatacaaatctttttttttcacaactccagagcatgaaatggggatgccagcatgtggggctctggtgagggccctcctcttggcttgcagagcaccctcttccagttgaatcctcacatggtggagagagaacaagctagccatcaagtgtctcatctcagagggcattaatcatactggatcagggctccacttttataaactcatgtaaacataattttctctataaagaccctattgtcaaatattgtctccctgggggttgtattttggagggacatcaatattcagtccactaacaatggcaaaatcttggttactgcacagtgggccacatgggggtgctgtggaaccactgagctccaaatgtctctggggcatgcacagagccaggagcctgggacagggagggttaaggagcagccttgcttgatgtttgtgctcactaaaaaatgtgatgacggatacataaaactgcaggtgtgcctctcatcagggagccatgcacttcagctatgcctgggttaggaagcctctgtgagccgaagagggagaatgaagatgggatgtcccatgctgggatgggacaacctgcatgtccagggcagggacagatagaggaacaactgcctggaaggaaaagcaaaggaactgtgggggggacatgcagcctaacctcagtccagccccacatggtatgtgagagtattaacagcacaaagcagaggtcctggatcgggtaagccaggggcctaacaaggaaggcaggatgcatgggaacccgcagagatgacatcagagtagtgatatcacagcctaacatccgatcagagatgcaatgcccaaaaccccagctctcagaggaccagtatccctcacagggtgacacctgaccagctctgtcccacctggccatgggctccaggtacctctgatgggaagacctttgtctcttgggaacaagtgaatccttggcacaggtgggatgtctctgaagcacgcctcatccaaggcaccctcaggctccctcctgtgttcttgccctagcctctgtctccctccctcacaggcccagtggattctgctgtgcagaacagagagcagtggacctcaggaggcctgcaaggggaggacataggacagtgacatcacagtatgcccctcccaccaggaaaagcaaggctgagaatttagctctttcccaggaggaccaagccctgagcacagacacagtgctgcctgcccctttgtgccatgggctccaggctgctctgttgggtgctgctttgtctcctgggagcaggtgagtccctgcagacaggatagcgccccattctgagcctgtcctcacccctgtgtcttccactttaccatggggaggcaccaccaggctgtctccggtgctcattctccatctgcttttcccacaggcccagtaaaggctggagtcactcaaactccaagatatctgatcaaaacgagaggacagcaagtgacactgagctgctcccctatctctgggcataggagtgtatcctggtaccaacagaccccaggacagggccttcagttcctctttgaatacttcagtgagacacagagaaacaaaggaaacttccctggtcgattctcagggcgccagttctctaactctcgctctgagatgaatgtgagcaccttggagctgggggactcggccctttatctttgcgccagcagcttggcacagccctacaaagccaaccacattctgtgcacaaacctccctggcccaatgtggagcaacctcagccctgacatatctgtgagaacctggggactgcagggagaaagaaaggcaatttagaatgctaggatccacagcctggggctttctgcaactcagggctggggaaaacaaggccaagagagcctgctcagaggatggtgctgcttccgtaggttgactgcagcattaccttctttgccgacactgtgaactacaggagtagaggaaatgtgtgtaatttaacagctggcgcactctttctcaggacaagagatttaattttgtggtcaagattgttgataacagtgtagtgtagaagggagaatcacagggtttgctttatacaacttggggagaagaaattgaggttttgggaaagtcaaggagagagaaaacgaaagatgattgaaaacagagatagagcagaaggtgatgaaaagtggtgttctgtgcaccatgaactctctttcccccacccgaaagttttcaacacctagaaaaaaataaggaaaggtcttatagccaccggaatcacctggtagccggtcccagtcggaggcatcaccaaattgccgcttggccattgtgagagccctggagttgcttctgctgtcttccttcttccagccctgatcttgactcctcaggccacagtcaggtacttcccaaaacacagaggaaggtaaagtcacccttcttcctaaaggggcaaatactttccagtttccccccaaataaattctgcaaccctgggattcctttctgacactcacctcccaaatccaattaccttctatgaccaaatgctctttgaacattttctaaaactcagcagtctctacatcctctgcgtttgtccttacagtttccatggcctgggaggacctttgttctcctaagacggggccacatactgatcatctgtcaaggacaggctcacacctgccttcctcttcacttcttactgtgacattccctgggactgtactgtatcactctctttcctttattttaaagccaagcatacaattgatactctttgatgtttgcaaaactaataagttattgccctctcatacagaatcctggagtgtgattaattactgtcttctctttacaagggactctacatgaaatatcatggagaatgattatgaatagtcttagtatttcatgtaacttctgtaatattcctagcaattgtgtcttcacagtcaggattgatgaccagtgctgtcaagttcccaaagggtatctaatgctggaatttgcaaatgttcttttggagtgaagaaaattatgttatttaggctgactgaagaatcactaaagaaagaaaattatggtacagtaatatttataaagactcataatcctgtaaaaaacttcctcaccataaccacactttccacagccacatttttagagatttggtgagggtggaatatagtcaaaggtgcttcttaatcatccttgatgaaatcaaccaaaatcaacctacaacattgaaaaaaaaaactagctttgctcagtaatggaatcttatcatccttgacaatgaaaagatattatgtgtttgtgagtgtgaatgtgtgtgtgtgttttcttgtggatactcactcacatagaagtttctcccctggtggcattttatgaggtgctggatcactggcagagctcctaggcacttctaggtaaggatagaaaatagcagacctaacggaatctgcctaagttatagctgataagatagtttatttcaagattttatacattcagaaataaatttgtaaaatcaaaaaatcctttttataaaatgtgcttgctaaaatttgtgaataattaaactaaatgcaatgtgtgaaaagatatgagtctgactaatcaaagggagctctgcaatgtagtattttcagcccagattggcttgatattgtcacactttcatcctgtggcctgtataattctggctcctttcttccatcttatgatgctcattgcaataatgtaacagcaatttcttgtgcaatcaagatgtgtccttttgtctccactggtcaagggtgagtttgaagttccaccctaaatcaacccttccgggaaagcaatagacagggtgtgtgaaagaatgggggctgcaggggttggagtgggggcaaccgtgttcctgacttggactatcctgagctcatcaggtcagaaggtgtgaatccatgggactgtggaatgttggccacttgggggcgctgtggccccactatgctgcagggaaccctggggaggggtgggagggtggccaggaagggagggcggaagggaatgcctggctgcctgctgacatcaggagattaggtggaaattagagtaggtcctggcctgggactgcccagggaaaggtagggccagggttggcaccaagcagggagtgtttctgcctctgcatgggcagaggagggtgtaggggctggggtggcaagggctgggaatcagtgtcaggacagggatagggtgggcagaggaaagtgaggtgtgatgtgggcatgcggggactgtgaccagccacctcccctttagttgaggggctgtgcgggacaggaaggctgcatggagctgctgagcctgagtctttcaatgggtgaacaaggcaggagtggcctgcagaaagagtacctggaaaaggactgtacccgaagaattgggtgacactttcttagctccactcagggagtgaccctgaggagggtgctgccagccagaggggctcaggtcctggtgagctgacaggcttttcctccagacacttcctgttgtttctgtatgtgatctggttttatgctcactgaaatcatgtaaggtaggtatgatttcacctgtttatacatctgaaggaaagcagctgttccgggtctcatattaagtaattggctgaggtgttttcctccaacatctctgcaccagccccgtcccccgactctatatctgtcccttcatctggcttcccctttccaggtccaattagcaggagcacaaggtcatgcctcatatgtgaccattgtaacctcttccctgacaagtccaaggaacacgtgacttccaggccaagcatatccattcacctttcactgaagcaaaacagaaggatgaaattatctgcactgtacacttcctgtaactgatataatctaccttgaggaaaagtaacaagaaaaattgttattcattagttattattttatttaatatatgtttggagatcctttctttgtatagatattttatgacataaaaagcaaaataaaaaagaacaaatgaaaataaaaaagaaaagcttgaaagaataataagtgtttcttactttttagagtattaaggtttgcattaatttttttaacttattcaaagacgtttgctcagtttctgaattatacagatttcctttttttcttctctttttctctttagccacctacagctttttctgccagcttttttagtttaataacctaaggctatcttttaaacagatttttaaatgtacaatatagtatcgtaatctacagacacaaggttggacagcagatctctaaagcttcctgattcttctttactgaaattttgtagccactggcggcagctgcccatttccccctcttcctagcccttggaaatcaccattttcatcttcacttacatcagtttgacttttaggttgcctcatataagcacaatcatgtagtatttgtctttctgtgcctgactttttcaactcagcataatgtcctccaggtttagccacattgtcatgtatggccagaatttcttctttttaatacttaatgatattccattgtatgcatacaccacatttaaggtctgaatattaaatgtatagtatcttattgtttctgcgaaaccatctgtcacaggagtggcagggtcatttgcagaacagtaagcactgagtatatgaatgcacattcattcgaagttcaattctgcttcatagagaagacttcaaaaaaataataatttcactatttattgttattttactatacacaaatagaatttcttttttcttttttttttttttttgatacagagtctcgctttgtcgcctgggctggaatgcagtggtgtgatcttggcccactgcaacctctgcctcccgggttcaagtgattctcctgcctcagcctcccgagtagctgggattacaggtgtgcaccaccatgcctggctgattttttgtatttttagtagagatgagatttcacagtgttagcctggattgtcttgatctcctgacctcgtgatctgcccacctcggcctcccaaagtgctggtattacaggtgtgagccaccgcacccagccaataccccaataccataaaatatttagcatatagtagaaatctagctatttttatttcctttgctagtctcgggcagcctcttccactgcgccaatgcccaaaggcagttaaagacacattttgcctggaaatcttagggtgaggactcaggaagccacagaaatggaaatacatatgcgtgatgattactttgaaagtatgaactagagaatgtagcatatatccctcctcaggcatttaaaactcagtattattgatatataagttatataagcattacacattttaaataaacagatcggttatacgtaaccaaataattaacagaatgaggagctcctgaaaagttttatggttttaaaaggggttgaagccaggtgagctaccagatccacattagggacaattctatctggagatggatattgtgatgaaacaacctcagaaggtcttctaacctggtacagactgattttacgaagtttatttattcattttctttcatttcttttcttatctgctcattcactccaattattttgtaatgatattttggcgaaaattaatcatctttaagggaaatattttgagtttcatcagacacacatgcagctgagctttgtgttcacacactgagtgccctggggccaaacaaaatacggtaatagtgaccttgttgagagatgacgtcacattgggagaaaggttctctttgtgttgacactaagtgtccaattcataaaacctaagccttgagctaggaaatgcccttttctgccctgggaagcaggctcctacattgtgtgtttttctgtctcctggtctagcctggacacagacagtgtacccactcacgaacttgttatatcctggctgtgaatttcagcaccaggtggccctttgctctgacttcaatttctgtgtccttctctcctaaacaccatggatgctgagtgactcagactccagtcatgtgcttttgccaaaaggaaactagcacaagaggaggtgagcagaatatgaaacaaaaccatgtactcaggaccggcaatgtgacttactggcagctctttgctcaaatattgtaaggaagttgaagatcatgacaatgttacagtaacagggatctctttaagtgtggggctctgtgcactaaaatacgggtttttttttttcttttctttttttttttttttttttttgagacggagtcttgctctgttgcccaggctggagtgcagtggtgcaatcttggctcactgcaaccttgcctcctgggttcacgtgattctcctgcctcagcctcctgaagtagctgggattacaggtgcgcaccaccatgaccagctattttttttttttttttttttatttttagtagagacggggtttcaccatgtttgtcagactggtcttgaactcctgacctcatgatccgcccacctcagccttccaatgtgttgggattacaggcgtgatccactgcgcctggcctttttttttttttttttaattgttactgaattagtggtgagaatcctgaccaagggaatattccctatgaaatatgacacttcaaataaaatgagagcgctttttcttatcctggagcctgcctcttctctcctctccccacatccctcacatgtcaagacacctttgtgcccacagatcatgggcagcgttgggctgccactatcatccacacagagagggcagtcagcagcgtgaggtggttctgcctgctgcggtctcaccccaggcacagaaagcaagagccctgggtggagctgaaggtgctcagctgggcttgtcaggagtcccatctgtcggtgaattgaaaagaaacagagcaaaatgactcctccaatggtgatgagcctgcccctgggatttggaaacttggtaacagagaaaaccaatatagacaaaggattttaaacaggattatggtcaattaagcaaattagaaaaggatacttgaagggggatttgggacacaggagtcaaaaacaccgggaagacatgagaagtttccctaagagtctaaattagagaaatatttagataactgacaccagtgtatgaatgaggaattatatcatcacagggataagagttccattgagttacaaactgcttccaaaaaggttaagaaaaactcgtaaggctgtgtcaattcagacaaaggcattcttcccattcaaacggttcaccggtgcatgaatcttgaatttgaccatctggggaaggggcgtggcctctcctgacaggaaggctctggggcccaggcagggagaatgaagtctcagaatgacccccttgagagtcctgttcccctatcaccgatgcacagacccagaagacccctccatcctgtagcacctgccatgagcatcgggctcctgtgctgtgtggccttttctctcctgtgggcaagtaagtcctgggcagggccccatgtgtggatttcaaggcccagcctgtttccattgtggctgcagcatcagctttgttcttctctgcaggtccagtgaatgctggtgtcactcagaccccaaaattccaggtcctgaagacaggacagagcatgacactgcagtgtgcccaggatatgaaccataactccatgtactggtatcgacaagacccaggcatgggactgaggctgatttattactcagcttctgagggtaccactgacaaaggagaagtccccaatggctacaatgtctccagattaaacaaacgggagttctcgctcaggctggagtcggctgctccctcccagacatctgtgtacttctgtgccagcagtgaagccacagcgctgcatggccgtctcctctctgcacataaaggcagggaggctctgcctcctccctcaccccagactcagtgatgccctgggcagagttctctgcaccaggaaacttgaaaccccatcatcatgggtctgaggcccccaggatgaaacaggatttgtatttcagatccatctagactctcgtctctccctggggaccatgttgcttcttctctctagggttccccccagcccccaccctcatgttgtctctccctggggaccatgttgcttcttctctctagggtttcccccagcccccaccctcatgttgtctctcctgtggcccacctttcccatctgggcagtcaccctccaaggccttgctgggtctctcctcccctcacttccccacacctctccacagcagccatgaggggagcccctcttctgtgcctccttccttcccatcacagagacttcaaagtccattttctctgccctgggctggaggcttcctttctgcagtggccaactcctacctgtgcttcacatctcagcatgatcagccctcctgtgggaagcatgcccttgcctcccagctgagatcaatttttctgttataagcactgatggtaaaatgtgcttgttagtcaacagagttgagcacagttggagttttccagttacttgtctggatatttttctgctcatgtcgattttaaactccataaaggggaaggctgtgcttgttacatttaccaacagctgttcctggaatgaagggagacctgtttcacagataatggatgagttaatgaatgacaggctgattgagtgatgagcgggtggatgaaccaataacaggaacactccaggtccgctgtaccctggcagaaatctagagttaactgtgcctgagatgctctgctatgagctcttcaaagggcactcgcttgttgaacaagcgttggaccattcattgtgcaagccagtttgtcagttcatctaggagtttccaattttaaatatcatatgttcttcaaactcaatgagggtaaagtctacattatacaattctaagttattttttaaagttttgggttaggaaccaaaaaggaaagaagagggaatatctttagactttggagtttttttattgaaaatgtatttatataaatttttcttggaagaacaggtagggaaagtcatgactacacagccttataggtgctaatttctggagaaggtgtcatgaaaaataacaaaaatgagaactgtgttctggagggaacattgtgactgtcctgagagcgtgttctgatcccaggaaccaaacccaggagtgtgtttggcaactcagagtgcagcagacaattctttgccccgtgcatttgggataagactggagacagctggaaaagctatggactggacgttctgcactctcaatgcaggactctctgaaatcccacagattaatgtcaggtaaatatattcccactattaagacaactaaagcaagaaccaatgaagaaaagtgagtagaaacagtaagcaattgaaatgtatgaagacaaggaattttgccataaaaagatataaaagttaaagagctatatttaaaggaatacaaaagcgaattgatatgtgaacatgaaaaagaagactgtcagaaataatcaaggaaacattaaaaaataatcaaagagaatacactaacgattaagattatcattgaaaacaaaatggaaatgaagaaaagatgacatgcttcaaaagagattgttacaggaggtcaaagacagatctgaagaagttacctagaatgcagcacagaaaattaaacaggaaacaagaaaaggtaagggataaggaataaaacacttgtgggttctagtgtattagtgtatatataatattttgttggaacttcccatttttcttacacatgattgaagtgtcacaaagagaaagtagagagaatgataggtgataattatgagacattagctgagaattttcaagacgtgtttcaggacctaaatcctctgtttcaacaagttaaatgaatatgaagtagatgaatacatatgttatggtgaaattgcggaacacaaatgacaaagagaagattttaaaagtagcccaaaagataactatctcccagcagaatagactgaaaggaacagtgaaagtcaagaaaggagattaaaaataagcatcaagtcagaattataattctcattcattaaatattgagattgaggtaaatatatttatagatagagaaagaaaaaacacggtgagtttgtcaccaaggtatcctttctgaattatagttaacaaagatgggaagtggtcccagaagaggggcatgaggtgccgctcgtgagggaacccatgtgatgggacagccccattgggcacgtgtgactggggggatggaggaggctggggcatcaatggggatggcacaggggactctgacttgcaggaaagacaatgagctcaccttttggtgctttgtgttggcggagctgttgacacatcctagagaacatgcccagcagacagaggagcggctgtgggatgaggagataaactcagagatgcagcgtgaggcctccgggtccagacagcatgagagcccaaagcgatgatacatgcattgatgttgttaaaaaggattttttttttttttttgagacagattctcgctctgtcgcccaggctggagtacagtggcgcaatctcggctcactgcaagctccgcctcccgggttcaagccattctcctgcctcagcctcccaagtagcttggactagaggcgcccgccacaacgcctggctcattttttgtatttttagaagagacagagtttcaccatattagccaggatggtctcgatctcctgacctcatgatccacctgcctccgcctcccaaagtgctgggctcacgcctgtaatcccagcactttgggagaccaaggtgggcggatcacttgaggtcaggagtttgagaccagccggggcaatgtggtgaaaccccgtctctactaaaaatacaaaaattagcctggtatggtggtgtgagtctgtaatcccagctactcaggaggctgaggcaggagaatcacttgaacttgggaggcagagtttgcagtgagccgagatcacactgctgcactccattctgggcaatggagcaaggctctgtctcaaagaacaaacaagcaaaaagcaaggaactcataaatatttaaaggagtcatttaagtaggtcctaaaataaatcctttgttcctgtcattgcgtggattgagagaggatgtgatgtcactatgggaccttctgtgtgggaacaaggacatccctcctcctctgctcctactcacagtgactctgatctggtaaagctcccatcctgccctgaccctgccatgggcacaaggctcctctgctgggcagccatatgtctcctgggggcaggtgattcctcagatgccaagcagtctcctgtgtgtgtgtgtgtgtgtgtgtgtatgtgtgtgagatgtgtgtgtgagagagagagagagagagctgactatagttgtttttctcattcagttcccaatttctgtctccacagatcacacaggtgctggagtctcccagtccctgagacacaaggtagcaaagaagggaaaggatgtagctctcagatatgatccaatttcaggtcataatgccctttattggtaccgacagagcctggggcagggcctggagtttccaatttacttccaaggcaaggatgcagcagacaaatcggggcttccccgtgatcggttctctgcacagaggtctgagggatccatctccactctgaagttccagcgcacacagcagggggacttggctgtgtatctctgtgccagcagctcagccacagcactactgctccagtgtcagcttggttccctaggaaatggggtttctagaacctgaatgctgacaaataagagttgtatatgtgtataccatgcaacctgcgtttaaaaatgtatgtacatagtgcaatgactaaatctagctagttaacatatgcagtacctcaatccttatcctttccagtggtgagaatacttaaaatgtactctgttagcattttcccagaatacaaaccactgttgctaactctagtcatttgttgtataatagatctttgtaacatcttcgtcttatctgagtgagattttgtatctgttgaccaacatcttcccaacagtccatctctactccagcctttgctaattactgctctagtctttgaatttgaagtaatttccctgaggtctttagctcaacaagatgggggaattttctctataatgatgcttacgttatttttgctttgtttttgtttcgttattttatgtcttgcaatatagtgtttattgtaaatataaataagtatattgtaataaaaatccttcacctctctttgggtaaagctacagttcacatattctaaatttcatgctgtgaccaacgctgacataattatggatcatgggtttctgggagtcctcagagacagccccatacaccaagtttaagatagaatattccagacccagccaggacagaagtgcatggtcctgcatagctccttggaaaattatagttccccaaattcagttattggatattgtggtgccgcagacaccaaacgtctttctctagcaaatgatggtccttggcagggattgttctgaacccattacaattttgccatcatcaaatcactccttgctgttaccttgtgtctcctgggagtgaggacgccccgggcacagatggaaattccctgaccttcggatgctatttcaaggacttcctaagaccttgtgtccatctttttccacctttatccacatgactcctgagacccacgctcacaatagtggaccagctctgattcttaggcttgaacagaattcagaccacagctgtaaacactgttgctgaaaaaagatgtaaaaaaggtgggcagggcttcctacctacactgagggtgaacatacaagggcataaagggaatattttattaatagctaaaaaaagaagaaatacaagccctgctctaatgaaatgagaactgtagcttcacccacagagaggtggaagattttattacaatatacttatttatattcataacaaataatatatttgaaaaaataaagaaaacaaaaagtaatataagcattattataaagaaaatacccctgtcttcttgagttaaagacctcagggaaattaagacacatcaaaagactagagcagtaattaccagaggctggggtggagatggggtgctggggagatgctggtcaaaggatacaaaatttcactcagataggaggaagaagtttaaaaaatcttttatacaacaaagtgactagagttaataacactggactacattctgggaacatgctaacagagttgaattttttagttgaaccaaagcagaatgtccataaaattattttgaatcaaagtctagaagctttcaaaccagttggcatagccttgtgttctgtgatctcagcagcttcagaggacttggcaatcctttctctgcacaaacacccctttgtccactctaagaactagggacacacactcttatcctatcacgaaaacaacaggctgtgctacagttgctggtaactcgttttaagggtgttgagtatggaggattgaacaagattgaaagctatgctcctgagtctgggaatgtgctggaaccagcttgcatgattcagaagagccaaataggcaaacccttcccaaatcctcattgaatgaagccatgatgacagcttgaaatctgccatagtggctatgctgataccataggaactgacaaatgctactaggcatggccccaccctcacagatatccagtttacaaggacatcactggaatgttttctgatacaatgatgatcctattagggcatgtcttatggggccaaaaaggctcagaatccactgtccatctgtttctgctcctagaagccatagtctaagggaatctcaagtgatcctacttctctccaatctccaaattcccttgctctgtgggtctgtgtctcttatgagcatgccaatctgaaacaagacaactatttggaatgtagctaaaggaaacagggaaccagtccattattttcaaattatccttccttgcatgaagtatgcagatgctgcaatcactgaaaacagagatggggcaagcagcagctctgggctgtgagtcactttatactatagtgccccgctattcctctgtggcactgacagaccctgcagcatggactaatttgcataggaaactaagcagcccctgaccatcaggtatgaccctggattcattttgggctgagaggtcagaaggatcatactcaccttaaatattatcctctccaagctgcaatactcccactgtccatcttagtcccaggatgttgtccagagctccagagaatcccttctcttggggcagaatcaccaagcttgctccctccagatttccacagtctccagtgggtatggggcacaggtgccattctgtgtctcaggtagagagaggcatcatgtcaaatgatatttgtagaagagggattcaaattctgaggctcctctccaatatttgacataattttctttgcttcttgtttcattctacaatctcacaatttaggagagtaattcttttgcggttgcattgttgacagcatttgggaaagtttttgtggttaaattaatttaaacaatcattttaatggtgtatttcttctgttcacgatagaacagtgaaagcagtcatttacacatcctgttgatgaaggtgttgtttaaggttcatgatccacacctaactctcaatctagttgaaatgaaaaggtgcagaattaggtggcacgtgagcaagctatgagagaggctcatgccaattactgtgggatttggagggagggagagatgacctctgctctagaccatgctccacgaagaaggagtgggagtttgtccatgggagactgcagaggaataaataccagcagcttctaactggggtggagtgagggctgcgggagcaaatccttggaacagaaaatggtgcatttgagctctcacagaggacagtggaaagaaaagtcatataggccacagtcccccggcaggttctgtttgctaatgatactattttgcaccagtgtgtccttatctcacaccactcctctgcctcttccagaataatctcttccctctccgctgctcagatcagcagatgtgccttgtgcaagttactcatttcacatagcaggccttttgctggtcttaattatatccgtcgttactttccacattagatactgtgtattgccttgcaaatgatcctactttttatattcctatttttcacttgttaatgcatatttgaccccttcttgaaggtcaagatgaccttggaaatataaggctatctcattatctggtcagtcttttactaatctttatttttatcgtaacattgactgtcattttgggggacatgtttgtttatcttgaatttcattgagtttcctcaaagcacgattttgagttctttgtcttaaaggtcgcatatctctgtctgtctagggttggtccctgttttattttttttttgagaaattaccgacttcaccagatgctgtaagctaccgggatagaggaagtttttgtgatttcatagcttgggtcttctttattcagggcagggaattttattttggggtcaagattgttgaaaatggcatagtgaagaaggtagagtcacaggagtttgctttatatacttgaggaagaagaaactgagatttgggaaaagtcaagaaaagagaacctgatcaaagatgactgaaaatagtaatagagcagaaaatgatgaaaagtcgtgttctgtgcaccacgaacgttcttctccccactccaaaagttttcgacacctagaaaatataaagaaaggactgatagcaactggcatcacgttgaggccagtctcagttgggaaaaacaccaaacagccgcttgtctcctgtaagaaccctgaagttggtcctgatgtcttctttctggactctggccctgatcttaactcctcagggaagtcaggtacttcccaaaatacagagaatgtcagattgcccttggttttgaaggagaaaatgctctgtgcttctccccaagataaattctgctttcctaggaatgctttctaacactcgtcatccagatctgattaccttctgtgaccaaacggtttccgaagattttgtaaaactcagcagcctttcacatcctctgcgtttgcactcactgtttccatggcccagaaggacatttattttcccacgacagggccagacactgctcatctgccaaggacgggctccctcccacctgtcttcctcttcacttctcatcccagcattctctggcactctatgatatcactctcttcactccacaggccaaaccaagaatataattggaactgcctgatgtttataacatgaatcaattcaagtccacttacatagacccctggaatacatgaattactatctcctctttacaagagacttctactacatgaaacatactggagagtctttagggataggctcagttttctacacaaattctgcaatatcctaaacaattctgtcttcacagtcataattgatgacttgttctctaaagtacccgaactgtgtttaaagtcagaatttgcaaatgttcttctgagaaaaaagaaaatcattacatcttagtgacatttatccagtctcacaatcttgctgaaaaatatttgtcatcataaccacactttccatgaccacatctttagatatttggtgagactggaaacatcaacaatggtccttctcagaaatcaacttaaaacactgaaagaaaaagtagctgtgctcagtaattgaacctcatcagccttgccaattaaaacacgttgtgtgcatgtgcttgtgagtgtgagtatgttttcttgtggagatgcaaatagtttctgtgggtggcatttactaagcatcactggatcactggtggagttcataggcactttcctaaccccagggagtgatgggaaatgtcacagccactgaatcggcctaagttatagctgatagggttgtttattttaaaattttacaaattcagaaataaatttgtaaactcaaaaaatggggccgggtgcagtggctcatgcctgtaatcctagcactttaggaggctgagggaggtggatcacgaggtcaggagtttgagaccagcctggccaacatggtgaaaccccatctctgccaaaaatacaaaaatttagctaggcgtggtggtgcacccctgtaatcccagctactcgggaggctgtggcaggagaatcacttgaacctgggaggtggaggttgcactgagccgagatcgcaccactgcactccagcctgcgtgatagagcgaagctccgtctcaaaaaaaaaaaaaaagaaaatcaggaaatcctctcttataaaacacatgatgtaaaatttactgatattaatttaaatacaaaataggaaaagattgggcctgattaagcaaagggagccagggaacaatgcagtgtttctgggctaggtgggcttgacatcctcacactgtttaattaagggtctgtgtaattttggctgctctctaagtgcaacaacggtttattttgtaataaaaagattggttcatgtgtccttttgcctcacttggcccagggtgaatttgaagatcaaccctaaattggccttttggggaaagcatagagggtgtgaggatgagggttgcaagggtgggagtggggcatctttgttcctgatttggacaatcttgaactcatcaggtcaggtgtgaatccatgagactgtggaatgttggccacttggtgacgctgtggctccacaatgctgcagggaaccctggagaggggtgggaaggtggccaagagaggagctgaagcctatgcttggctgcctgctggcttcaggggagtggtttgattcagagtggatccagagttaaacacaaactccccactaccagagaagagtagaggtgctggaggcctcagtttgcaccaaagagtagagtgtccctgtgtctgcttgggcagtggatggtgaaggagcttcagccacaagggctgggaatcagtgtcagggcagggacagggcaggtagaggaaagtaaggtgtgatgtgggcatgtggggcctgctctccacccaccaaacctttagtttcagggctgtgcgggacagatgcatggagcagctgagcctgggacctgccaaagcgtgcaaggggcagtggtggcctgcagggagagaaactcgcaaaggccagttcccgcaggaagctccagaaacattcctgcccccactcaggaagtgaccgtgagagacatgctgtcagccagaagggttcaggccctggagagctgataggcttttcccaggcactttctgctgcttctacatgtgatctgctttaatattcacataaattatgcaggataagtattattttacctgtttatgtatctgaaggaaatcagctgtccggggtctcatacttaataactggctgaagactgggtgcagtggctcacacctgtgaccctagcactttgggaggccaaggtgggcaaatctcctgagctcaggagttcgagaccagcctgggaaaatcggtgaaaccctatctctactaaaaatataaaaatttggccaggtgtggtggtgcacacctgtaatcccagctactcaggtggccgatgcaggagaatcgcttgaaccctggaggcagaggttgcagtgagccgagatcatgccattgcactccatcctgagcaacagagtgagactctgtctcaaaataaaacaaaataaaataaaataaaataaaataaaataaaataaaataaaagtctcaagcctgttgtgccaacacctctccttaaccccttctttgtagctctatcctttcacctgctttcccctttacaggtccccatcaacaggttgtgaagttcatgcctcatacgtaatcagtatagtctcttccctgagaagtccaaggaacatgtgacttccaggccaagcatatacattcatccttcattgagacaaaaaaaaaagtgtaattttctggccagccatgatgcttcacagctgtaatcccagcactttgggaggctgaggaggtgaattgtttgagcccaggagttcgagaccagcctgccaacatggagaaaccacgtctctactaaaaataaaataaatcagccaggcatactggtgggtgcctgtaatcccagctactcaggaggctgaggaatgggaattgtttgaactcaggaggtggaggttgcagtgagctgagattgtgccattgcaatccaggctggacaacagagctagactcccgaaagaaggaaagaaagaaagagagagagagaggaaggaaggaaggaaggaaggaaggaaggaaggaagaaaagaaaaagaaaaagaaaaaaaaaggggtggtaattttctgaactgtagacttcctgtaacggatgcaacatatcttgagaaaaaggaacactagtaattgttattcactagttaatttattttattcttttattcaataaacttttttgggggacctactgtgtataagataccctatgtcgtcaaatagaaaatgaaaaagaaaagtatctgcagatgatggcagattttaaaaaataaaaaaagaaaataaataaagaaagaaagaatattttaaaataaaaaatattttttggctatttataacactaaggtctgcatttattttcatttttcaattgttttatgtttattttcaattgttttatgtttagtgtacttagtttttgaatttatatatttcctttcttcttctcattctctctttggtttctccttctctcttctttgccagcttgtatttcttttttatttaaacttttggtaaggacatttaacatgagacctatcctctgaacagatttttaagtgtacaaaacagtatcatagtctacaggcacaaggttgtacagaagatctctaaaacttcctcatcctgcttaactgaaattttatacctgttgacagcaactccgcattttccccaactcccagctcttggaaagaaacattctcatctttgcttccatgagtttgacatggttgcctcatataaacagaaacatgcagtgtttgcgtttctgtgcttgacttgttcacttagaacaatgtcctccaggttcatctatgacacatatggaaggattgtttttcttttctaacccttaataatattccatgtttcagatctgcaggattaaatggatataacatttggctatttctatgaaactctctgtcatgtgagtggcagagtcatttgcagagctgcgagcactgagtttattcaggcacattcacagataaattctgctccatggagaacattcagaaaaaaataataatgccaacttttatttgtcaattcactatatgccaaataaaaatctttcatttgaaaaagttcaattaattagaaattcagctatcagaaaaaaaccttaagatgcaaatgctattctcattttacagatgagggaattggctcataggttaaaaaacttgaccaaattgaagagctattaggatacagtattgggacttcaacctgatctgtccaatttttgcatttataactctgtgctatagtgcatttcatagagagagatgcctaccttcaaaaatcagaatattggatcctacatccctttcagatcaactggctctaacaacatggaaagagatcagtttaccctggagacagtgatgtaaggagagatctctggctagatgccatgacactcagccctgactcccattctaacaccaacttgtaaagacctgaggccattcttgacatgctgcgtttagtttgtgttttgggtttttatttttttctgtaaaatgagatgactactgcccttatgaagagttgtacaaagatttaatatgacaaagtatctagcatatagtagattctagctattttgatttcctttgctaatctcaaacagcctcttccactgtgccaatgagcaaagacaaatatgaacacattctgcccaggaatcttaggttgaggactcagaactcacagaagtggaaatatatatgcttgatgattcatttgatgaaattacctgcagaacatagcgtacatgccttctcagacattttaaaatcagcacaattgatatataaattgtacaatataaacattacacatgttaaataaacagatcaatggttttatatatatatatatatatatatatagacatatatatgggttataaggatatatatgtatatccttataaccactatccctataaaaaggtctctatcacccagaaatctctctcatacccctttgccatgactctctccatctctgacaaccaatgatgtgatttctatcactggagaatacatttttttcaaaaaatctattagtaacattttaaaacctgtattgattaatccttttcaaatacatacatttaagagtgcaaggtgctcctcgaaagttttatggttttaaaagaggctaaatttctgtgagctacctgatccatgttagggacaatcctatctggagataggtaagaggatgaaatagcctcaaaattactttccagctggtggaagctcattctccaaaattatttattcatttttatttatttcttttatcatctacccactcattcaaattatttattttataatggtattgtgacaacaattaatcattttaatggaattattttgagttcccatatcacacatatttaattggccttcaagttcacacactgaatgcaacggcaccaaacaaaccatggtaacagtgactttgttgagagatggtgtcatatgtggaaaagggttctctttgcttttaccgcaagtatccaacccataaaacctgaactttgagctaggaaatctccctttttgttctggccctaccctgggcaccaggctccagcaccatgtctccttctgggttctggcccagagaagttcttggcacagttgtagcacccactcatgggcttgctggatcccagctgtgaatgacagtagcagggccccctttgctctgactttaatttctgtgtccttctcaaataagccctatagatgctgagtggcctgggcccctgccatgtgcttgggctgaaagaaagacagcacgtggggaggtgagcaggagcgaagttgaagcaaatctagaattgacatggaaaggactttggacataaatccctaggcagtggtgagccactggtcctactccaagtgaaacaacatgatgaaactgatattgtgttacagtaacattggtagtagtacggatctgaaaggagatagatttttgggtggcatgaatgattaggagacttctaaatatcctccatgaaagattagaaagggtttatgtaaagcattgtggaagacataggcttgaggctctggattatgttatctcttggaaagagtgttgggttttattctggaagggttaaatgtaggacttgctaggttctatttgagctttgcccttcctcttagggagccccagcctgtggtcatcattgctagtgcatggccttcccagggtcttagtgggaatcacagtgtattcgccacatcactccactgcaactgggtctgaatgccctggctcttctgaaatctctgcccatgtcttcagccttccagaacttgttctctgctcagccttctggtctgccaccctctgcatacacaatttaggatctggctcaggaaaaaaaaaaggggggtttcttacatataatttttgggttcctttttactaccctgtgtcttaaatcccagctgtcttggagtcagttatgtcctatcttcaatcacataaactaacgatatttggtacagacatgtttactgactttacttcacgttaccattccactcttcactcttctttcttgcaattcagacagtcctgaggtcattctccttcttcagatccatctggaattcagatgacttcaactcacctgtcacccaccctatgctttgagacatgtttatgttagctactgacctcagggtagtcaagcctctcattgtcattgttattcaaggtaggttgaatcccactaaaaaacaaaaatccttgaaatttggtttccttattgagagccacacaatgcaatcaaattctttttaattcaatttttttttcttttttggtggaagggccaagaactgtttccttgctgaagcagactcctattataataatttgaatactaacaacattaacctttaaatcaggttgatgttaggttcttatctaagaatgaagtatatccaactgtagcaggttgaaggtctctcatatatgtaacctgttcaggacgagacaattcaaccacttttcttaaattctgatctacatgcctttacattctttgctttaagggccacataaaaatactctgaaacaatttacacatcagaaaaatgctaacactttcctcctggcccagcacatctccaagttaaaaaaatctctaaattatcaacccatagtttaatcatggtaactcccttctacccccaacatagatttttatgtaactgatttgtaactacaaccttaaccgtacaatcacaattgtcattataaaatactaacaaacatgtgctattaacaatggatggttaaaatcacttagggattatgaatcatttcatttttgtgtttatttattatgtcagtttcaacctgatttccctttcccttgttccacacaccttgggttgttctttttcagcatcctgtgtatgttagctctaagcccagccaaggctcatgtccctccacttcagggacagagggtggctcatccctttcgtgctccctcagctccctccccggtgcctggttgctggttggcatcacagccatgcccttgaaagatgggcgctggtccacactgcatccgtggtcatgtagccaccctccctccacagaaccgagcaaaaagggctccaccgcgcttaggcattgagggaatggacattttgaatggtgctgtcttgtgtgatccctcagaggagaaggagatttcttgaatgggagtggtctgttgctgagagggatcctgaaagacacggggacagagacaggggtaggatccacataatgaggaagcagctgagaacaaaggagcccctgccagaggaatatccttggggggtaaaaagctggctctgccctttctccccagcccattcatcccagcccagacaattcaaatctgccttctatcaggacctagaaaggatgtaaaacggccgggtataaatatcccctgggtctggggaaactgtcaggagcagtgacatcacaggaaaaaccaccaaccaaggccaaggagaccagagcccagcacctcacccagaggaccccagtcagaggccccatctcagacccgaggctagcatgggctgcaggctgctctgctgtgcggttctctgtctcctgggagcgggtgagttgggttcacatcagctgtccttgaattcgaaactttttccttgtgatttcagcaacaagcctcctcctgggctctgcctgaattttgtccctttccccccgcagtccccatggaaacgggagttacgcagacaccaagacacctggtcatgggaatgacaaataagaagtctttgaaatgtgaacaacatctggggcataacgctatgtattggtacaagcaaagtgctaagaagccactggagctcatgtttgtctacaactttaaagaacagactgaaaacaacagtgtgccaagtcgcttctcacctgaatgccccaacagctctcacttattccttcacctacacaccctgcagccagaagactcggccctgtatctctgtgccagcagccaagacacagccttgcagagtcaccgctttcctgtgtagaaaccttaggggccctccaggaagctttgggggccaccaaagccttcgatgaacatttcctacaagagccccgacagaagattcagaacatcatagcacctttaatggcataaaatatctagcatatagtagaagcctagctattttgatttcctttgctgatctcagacaacctcttccaccacaccaatgtgcaaagacagatatggacacattctgccaagaaatcttaggttgaggactcagaagtcacagaaatggaaatatatatgcctgataattcatctgataaaattaactagaggatgtagcatacatatctcctcaggcatttaaaaatcaacattattgatctttaaagtatatgaagttaacaggacaccttttaaatgaacatatctgtgatttttgagcaacatatatctatatatgcaaccccacctctatgaagatgtatctgcatcacccagaaagtccctcactcccctctgcaatgcctctgtctgtcccagcaaccaatgatgtgacttctatcactggagagtcgttttgttggcaaatatttttaatgcaaatgtcaaacctcttctgaataatcctcttgaatacatagctaaatcatcaaggcagggaggagttcctggaggttttatggttttagaagtggttgaagccaggtgagctacctgacccatggtagggacaattctatctggagatggatattgtgccaaaataacctcaaaaggtcttttcggctggtagaagctgattctacaaaatttattcattttcattcgtttattttctcgtcaattcattcaatcaaacaattttatgttacgttttgacaaaagttaatcatctttaaggaaattattttgagttcccatcagacacacaagcagctgggctttgtgttcacacagtgagcatgctggggtcaagcaaaccatgatcacagtgacttcattgacagatgatgtcttattgggagaagggttctctttgacttgaccccatgtgtccaacccataaaacctgagccttaggctaaaatccatcttccttttctcaccctgccttgggcaccaggccactgtgctgtgtgtttctctgtctcctgaagcagagtcctgggcgcagatttggaacctattcgtgggcttgtttgatcccagctgtgactttcagtaccagggggtcctttgctgtgacttgaatttgtgttttctttactcttaagttccacagatgctgagtgacccagaccctggtcatgctcttgtgctgaaaggaaaccagcacatggggaggtgagcagtatatgaaacaaaatcatgtatttacaaccagtggcaagacttactggcaggtgctttgttcaaacactgttaggaatttgaagatcatggcagtagaatgtgaaaccaagtgcagggtccttccaaatgcaggcctctgtgcaccaaagatagacttttggagctcattttttttaaacaaaaacggaaacaacactctatgttcatggctgtaggccatgcgagaatatttttttaaattttaatttaatttttatttttccatatattattggggtacaggtggtatttggttatatgagtaagtttttagtgatgacttgcaagactttggtgaacccaccagctgagcagtatacactgcaccatatttgtagtctgttatccctcaccccctcctgctgtttccccaacacttccccaaagtccgttgtatcattcttatgcctttgtgacctcatagcttcgctcccaaatatcggtgagaacatgctatgtttggttttacatttctgagttacttcacttagaataatagtctcccatctcatccaggtagatcattccaaatgctgtttattcattcctttttatggctgtgtagtatttcatcatacatatatgatatatatatgatatatatgatatatatgtgatatatatgatatatatcatatatatgatatgtatatgatatatatcatatatatgatatatagatgatatatatatcatatatatgatatatagatgatatatagatgatatatatatcatatatatgacatatatatgatatatatatatcacagtttctttatccactcgttgattgatgggcatttgggttggttcctttttctttatcactaaattaatggcagcaataaatccagaacattcctcattaccctaaagtcagccctgtctcccaaactcccttacacatcaggacacctttgtgcccatagatcatgggcagtgcttggcagccaccactgtccacacagagagggtagtcagtagcgttaggtggttctgcttgctggggtctcaccccaggcacagaaagcaggagccctgggtggagctgaaagtgctcatctgggtttgtcaggagtcccatctgtcagtgaattcacaagaaacagaacaaaacaactccttcaatgttgatgagactgcccctgggatttggaaagctaataacagagaaaaccaatatagacaaaggattttaaacaggactatcggattatgatcaattaagcaaattagaaaaggatacttgaaggagtatttgggacacaggaatcaaaaacaccaggaagacatgaggagtttttccaagattgtagactatagcaatacttagataaccaataccagtgtattaatgagtaattattagtattattattttgagatggagtcgcactctgtcatcaaggctagaatgcagtggcatgatctcggcttactgcaacctccgcctccctggttcaagaattctggtgcctccgtctcccgagtagctgggactataggtgcacgtcaggatgcctggataatttctatatttttagtacaggtgggatttcaccatgttggtcaggctggtctccaactcctggcctgaagtgatctgctctcttcagcctcccaaagggctaggattacaggcatgggccactatgcacagccaagtaatttgtatcatcatgggaataaaaaatatacattgagttacaaactaattaccaaaagatatttaaaaaatggtagacttgcatcgattcagacaaaggcattcttcccatccaaactgttcactggtgcattgatcttgaatttgaccatctggggaaggggcgtggcctctcctgacagcaaggctctggggcccaggcagggagaatgaggtctcagaatgacgcccttgaaagacgtgttcccttttcaccaatgcacagacccagaggacccctccatcctgcagttcctgccatgagcctcgggctcctgtgctgtggggccttttctctcctgtgggcaggtgggtcctgggcggggccccttgtgtggatttcaaggcccatcccctttccactggagcagtagcatcagctttgtccttctctgcaggtccagtgaatgctggtgtcactcagaccccaaaattccgggtcctgaagacaggacagagcatgacactgctgtgtgcccaggatatgaaccatgaatacatgtactggtatcgacaagacccaggcatggggctgaggctgattcattactcagttggtgagggtacaactgccaaaggagaggtccctgatggctacaatgtctccagattaaaaaaacagaatttcctgctggggttggagtcggctgctccctcccaaacatctgtgtacttctgtgccagcagttactccacagtgctgcacggctgtctcctctctgcacagaaaggcaagggaaggtgctgccctcctccgcagcacagattcagcgatgcccttggtcctagcaccgaaaactttggagccccaatgggcccgggcggtgcgagccttcatctgtgccaggtgcctctgcagtcggtctcggccaggcctggatcggtcccaggacctcagatgtcttccttgttgccctccggtctttcctctgaggtgtccttttgggctagtgccaggggtttcccagctctgactttcctagtcattcacctgagtctgaggcctcctaggtgaaataggatttgtatttcagatccatctagactcccgtctctacctgggtaccacgtgctttcctctctctatgatttttcctcatgttgaaccctacggtggtctcagctgcagcctgcatttcctatattcacagtcgccctccaaggccttgctgggtttctcctccccgacctccctgcccttctctactccagccatgttgagagactccaaagtccatttcctgtgccctgggctggagccttcctttctgtagtggtcaacacctacctgtgcttcagatctcagcatcatcagccctagtgataatcaccattatgcttcccttggctcccagctgaggtcagtttccctctcataatctctcatggtatcatgtgtctgttaatcagtagaatttagcacagttggaatcttccaagtactttaaaccccatgaaggccaaggctatgcctgggttataaatcagcagctgagcctggcacaaggggagatgcatttcagagaatggatgagtcagtgatggagtgagtgatgagtggatggatgaatccataacaggagcaccctagatccattttacccttgcggagatctggctgtaagtacaagaactcttacccttttgattgctgggctacgggaggtccttgaaattaatggggagtcgctatcatgggcggccccaccttggtcaaagattcctcctgagtctgcagcaccagacctcctccaggtctctgtgctctccttcagactctttcccacaacaactctacacagatcagagatccctttccagaaacccatgcatagagttgtgttattttggaaccacttctggtaccaaaaactccattaggtttacatcaataaaacagaatcactaaaagtactatggagaggaggatttatgacaggagttagaccttatataaatgtagggggagctgaggaagagaaggtctggaggggagatatagctaggcagatttaattcatgattaatgtgaccgtgacctcttattctactcaaaggagagcatatgatttcaacaaaaaaatattgattttcctttgtaaaagtttgatccaaatagtgagctatttttgtcccataattgtcttaagttggctaatggtggaacaaatccgactttgatttccttgaaagaacaggaaaaaaaccgtcattcatatacagtcttacaggctctattttatggaggaagcataataaataggaaagagaaaatcagaattctcttctggaacctacattgggactgtcctcagagcaggttgtgatgtgaggaatcaaatctacaggggtatttcgcagcttggagcgcagcagactgttcccgaccccatgcatttgggggtgagaccagagacagttgaaaaactatggaatcttgacattctgcactctcaagcctggcctctccctgaatttcacagattaacatcagaccaatttattccgactattaaaagtattagaacaaaaaccaaggaggaccagtgagcagaagcaataaaccattaaaatggacatcctaaagatttaaaattttgccatcataagatgtgaacgtttgaagagctgcatttaaatgaatacaagaagggactgaaacaagaatacacacaaaaaagagacggcccgaaaccatcaaaaaacattaaagaaataatcaaatagaatgtctagaaatcattacgattactccacaaaacaaaatggaagctaaacagcagattcaatgcttctaaagagattgttagcaatatcaaaggaggatctcaagaaatcacctagaatgcagcacagaaaattaaatgtaaaatataaaaaaagtgaaggaacaaggaaaaaatgaagtttctagaatattagaaagcatataatgttttattgaaacttttcttactttcttgtatataactgacgtttcagaaagagaaaataaggcaaatgatctgaggtgattgtgtatgtgatgctagctgagaatgttcctgagatgtttgaggaccgaaatcctcgttcaagaattcagatgaattgcaagacaagtaggcaggtccctgtgaaactgcagaccataaatgacaaagagaagattttaacagcagtcaaaagggaaagataaataacttccagtggaatagaatgaaagaaataatcaaagtcaagaaagaggattaaaaataaccattcaataagaattgtagtcctcatttattgaagattgagattgatttaaaaaaatctataggacaggaaagaaaatatggaaaaccaaaagaattctgtgagtttgccaccaaggtatgttttctgaattatagttaacatgggtgggaaatgatcccagaagaaaggcatgagggcagtttgtgggggaacccatgtgatgggacaatcccattgggcacgtgtgagtgtgggaatggaggaggctggggcatgaatgggtatggcagagggcaccctgacttgcaggaaagacaatgagctcactccttggtgcctggtgttgggggcactgttggtgcatcctacagtacgtacccagcagacagaggagcgtctctgggatgagaaggtgaacttggagatgcagtgaggcctctgggtccagacagcataggtcaaaaaaagagaacctgatcaaagatgactgaaaatagaaatagagcaaaaaatgatatatgtgcctgatgattcatttgatgaaattaactagagaacatagtgtacatgcctccacagacattttaaaatcagcattatttatctataaattatacaatataaacattacacatgttaaataaacaaatcagtgagctatatatatatatatatatatatatatatatatatatatagagagagagagagagagagagagagacatatatatatgggttataaggttatatatgtatatccttataaccactatccctatacaaatgtctctatcacccagaaagttctctcacaccccttggcaatgactgtttccatctctgacaaccaaatgatatgatttctatcactggagaatacatttttctcaaaaaatctattagtaacattttaaaacctgtatcgactaatccttttttaatacatacatttaagagtgcaaggtggtcctggaaagttttatggtttaaaagtaaagttctgtgagctacctgatccatgttagggacaatcctatctggagatagataagatgatgaaatagcctccaaattactctccagctggtggaagctcattctccaaaattatttattcatttttattgatttctttactcatttactcactcattcaaattatttattttataatgatattgtgacaacaattcatcattttaatgaaattattttgagttcccatctgacacatacttaactggccttcaggttcacacactgaatgcaatgggactaaacaaaccatggtaatagtgactttgttaagagatgatgtcacatgtggaaaagggttctatttgcttttaccccaagtatccaacccataaaacctgagctttgagctagaaaatctccctttttgttctggccctaccctgggcaccaggctcctgcaccatgtctccttctgggttctggcccagagaagttcttggcacagttgtagcacccactcatgggcttgctggatcccagctgtgagtgacagtagcaggcccccctttgctctgactttaatttctgtgtccttctcaaataagccctatagatgctgagtggcctggacccctgccatgtgcttgggctgaaagaaaaacagcacctggggaggtgagcgggagcaaagttgaaggaaatctagaattgacagtggaaggaggagatgaggaatatcaattatggcattaagtaccagtgatagtagcaggactgtatcttatttccttaaacctctgatacttgtacagatagcagctgaccacaaccttgaagacctatttggactcaatggaaataatgcatgagtggactgtatcagttgcctctattaccacctcatactctcttggttccacctttgattccagccacagctatgatgaacagttctatgcagacactgacctgctccacagttaccgcacctcaccttcaatgtggccacgtgttcccaaaacacgctgttgctgaggcatgagacacattggtggtctgcatggcgcttgttcatgcacaatgaagtgtgagtgagttaatgtcctatggggcaattctcaaccactggagaatgagaactggtggataaaagccttggcattagtctcaggctcctagaaaggcctagtttgatagccagccacctatctatagagatggcccgattaatatgttttcctttgtattttctctgctttttgtttctctgattcagtatggatattttcacctgacctatcttccagtttatctagtcttttcagctttatctatccttctttaaaatatatatatatatatttttttttcctaaattttatgtatttcatatatttcagttctggaatttccacttcaatcttgactacagtattcagttgtctgctaaaattctccattttgtcatttcctttttgattatattaacatcagttattttaaaggcagtgtctgataacacatctctgttggtgtctatttcttttgtccgctttcttttttttaatttttggtcatgcaatgttgttttctcacacaatcaacaattcatttgaatgctaggtattgcatataaaaattacagagataatgaggctctgaatgatttcatcttcctcagaaaggattcatgtttgcttctgctggaaattgtagcagagacaggtcaccttaattgagttgatgactgagctggatcagagctgggattcagccttcctgatggcttctcaactttgctattagccattaaacttccaactagatttctggagtattttaccagcttattaaagtgtaaattacataacataatatttgcctactggaagtgtgtaatttaatgagttttgataaatttgtggagttgtgcaacaatcaccatgatctagctctaaaatatttcatcctccctacccagaaagttccttcgtgctcattttcagtcaatctctgcttctacccccagcaccaaggcctggggtctttgccaggctcctctcctactcagtagtcactgaacgtaaatgttctccaggccagaaaggtggtggatgctcctcaaagcctttggcccatcagtcctccctttcttcttagcttctcagccatcaaatgaaattgacaaatgaatttaagggaaaagtaggtttttttttttttttagatttatccgttttctatgatatccctatcttttacgctcttactgccccagtagctccaagtgccttcaaacatttatgttttatattttgttaagcttttctagttgtttttggtggaagtgttgttctgccactatccagtctattaactctgaaagtcagtttttatatttattaaagatgaagtgcaattgagttggtaggtttgtatgtttgtattatggtggaaacttcctgaagagagtgaggagtgaagcccctctagtctcccgtcacgtgtccctaataagacctctaccaccctgctgcctttgttccactactggactgagccttgacacgtttgaccctttggccacaaggaggagctgtgactctgctgagattcagagaacttggaggaaggagagacaattctctggatggcagagggttaatagaaagattgagtttatttacaacaagggaaaatgtggtctgcaaagaatgctagtcaaggctctaagtgtgagggttaaatacagactattcattttgctttgatatgcaggcgcttttgtgctatggaagagcctggactgtcagacttccactggagcgtgcatgggattagaaaggacaaggcatgagctggggagagtgggagcccacaagcagacacagatggaggaccccttcccaagaggaataagagaggctctgggtgctgggccgttgctccagctcagcccagtacagctgagccctgccatgaagtgagtctggccggccaggggtcccttggggatcttgcagagaataataactcagggaaatcttcttatgagaccaaaggtgacctacagccctgttctcctcactctaaattatcggggaattaagctagaaagaagttttttcttgttcctcttctggatggtcctctgagtttttggagcaggagctccccacagtgataggaaacccctctcctaggcctgagcaaatgtttctatcaaaacagcatcaccagactcccttccagcttccatttccaagttctttccctatctacgaagaaccgtggaagctagacttgtccagacgtcaaaggatctgatgatgccaaaacacctggagataggaaagaaggtggcattgacagactgccaggatgcacacctgaaacgcactttgttttcactacaggctcgtgtttcacattttaaaaaagcatttggaacttccctgacttcttggaaatccaaaaatacaacaaagttacattttagtagactctagtcagtcatctggcaggaaaaagcttcaggatataaataaaagtataaatagtagtatatacatatatatactaattatttatatataaccttacatgtatatatactacatacatgtatgattatgtatacatatactatacataatatagtgtatacgatacatgtactatatacaatatatactatattatatatattctgtattacatatagtatatgtatatgcatgtattaccatatatgtatatatacatgtatgtatacgcatatattactatatatgtatatatacatgtatgtatatgcatacattaccatatatgtatatatacatgtatgtatatatgtaggctggatgactagagcctacatcaaatgtaactttgttgtattcttgaatttccaagaatcaagggaaatttgaaacgtatatatccaagtatgtagtgtgtgtgtatatatatatatacatacatgtatggtaatgtatatacatgtatataatatatactacatgtaatatacatgcatatattatatatacatgtatatatatacatgtgtatattatatatacatgtatatatatacatgtgtatattatatatactacgtgtaatatacatttatatatacatgtatttatatataccactaccaaatacatgtgtatatatatactaccatacatgtgtatatatatacactatttttatatataatatatactacgatacatgttctagcatattgcctgaagtaaaagtccagccaaatagtttaaaaggaaaaccatgagccttcctgtgaagattaattttgcatttcatcttgaaatggaacaaagaaatctactgaagatagtcaattcacttctatatacggaagtctacatttatcagctttctacagtatgagcgactttcaaatctcctaaaagttacacaaatcagaatatgcagaacacacatttctaagctcaatattaaatatgtaaagtgactaacttgaacgtaagagttggacgttcagggtcctcctgtgatttcttcattcccaccatcacaaaacatctacaccttcttctcagtaacaaaaatgagatgacataaaatcatttttcatagttaataaataatacctatgcatcatgacattgcattgattttttgttaatggttgttttcaaatgactataaattaaacatttataatctatacaatagaaataataaatgtaaatattttaagtggatacatgagattttagtagccaaacaggctcacacctgtaattccagcactttgggaggccaaagtgggaggatcacttgggcccaggagttcaagaccagcctgggcaatatagggagatcctgtctctgtattttaaaaaatagttatacagaaaagtaacatgaaatagtctgcaacaggatgtcctatctgggtttgatctgaatttccatttagaaaacagacaggcactggtccatctgcgggcataggttctcatgaattgatgtgcatgttgacttttgtattttgtcaaagttaaaggagatattttgatcagagtcagagccacaagtaactagcaggaaactgagtgggatggaggttatgccatggtccttgcttccttgcagagctaagaaaccagttgtgagcaccagcgaaaagagacaaagtcagatgaaactgaaatcttcatgggactctgtgcccaagaaaaccagcttgacaggattgggcacaagagctattccttccatcctacgctgccagagcacacagcacagtttcccccatgagctcttggggagctggaggagggagatagctgtgctgggcggagtcgtattcccatgggaagtccaaaaagtagaggcagggatggaggttttccttctagaaagagtggaagattttgtttacaaacgtacccatacacatgcctttctcccgaagacccaaactttggggaattgcttaaatataacaaggaggttaaatattggacagccaaaaataggaccgaagccaatctcttctgaagtaggtgtagtcactgtgcattagtcagatattcaaatgagcaaagattcaagaggaaaaaaaaaagcattattggaaaaggaagcaaaagatcaagagaagaaaaccagcctgactctgagaggagagcccaaaagggagaggaagggaggaggtcctcagatcccgggtagggagcagggagggaggggtacaggcacaggaatgactgtcagagacacatcctggaggccacaagtccactctctcaactattcccagaaattccaaaaactcctttaaagaagccagtgcagggcatgaaagggaggagccatgctagaggagatcctgggaatgggggaatgattacaggctgtgacctcaatggcacagcacctctcagaggcagtggaaaccacagcctagtcttctcaccactgcagaccagaatcctgccctgggccttgcctggtctgcctgactcggccatgggctgcaggctcctctgctatgtggccctctgcctcctgcaagcaggtgagtcctgggcccaagtgacaagatcctgttggagtccccgagccttttcaccatgacaacaacaggaggctacctcctgggatttgcctgaattctgcttctttcctttacagatccactggacacagccgtttcccagactccaaaatacctggtcacacagatgggaaaaaaggagtctcttaaatgagaacaaaatctgggccataatgctatgtattggtataaacaggactctaagaaatttctgaagacaatgtttatctacagtaacaaggagccaattttaaatgaaacagttccaaatcgcttctcacctgactctccagacaaagctcatttaaatcttcacatcaattccctggagcttggtgactctgctgtgtatttctgtgccagcagccaagacacagccttacagagccactgcatccctgtgcacaaacctcccggctcagccaggaagctgtgggccgtgtgtgcacctgcacccaaggctccagtctccattccctgatggcctctgatggagtttcagtctgtagtacagcctctgccagtgcacctgatgtggcaattctccattttatgtacacagaactctcagaattctgtttatcagctaaagcaggggttcacaacaaagtcagcaaagtatcagagctcaactaacaaaacaggagcctgtcccatgcactgaaggtctttactgatgggagaagccatttcttgtctttgtctgctgcacatatgggtccatattttactaatgttatgattataaacacactgtaggcaaaaatggttgatgagcctaagcataaagaagaggggaaggaaagtatttctaagatcaagagacaatttggattatcagtgagtattttgtttgacagagaaatattttgagaggcgtgaaattccatggcaataggtaaactggaaagtgttgaggagaagtcagtggaggcagccttgtgcattgtcggctccttctcttcaagaagggtgaccagcaagagtttctcccaattctgatgagtgtcatcttgaactctcctcaagagcaggtgacagctggatgacaggggatattgggagacatggaaaggaatttggacacaaatccctaggcagtggtgagccactggtcctactccaagtgaaacaacatgatgaaactgatattttggtacaggaacactggtagtagtatggatcagaaaagagatagatttttgggtggcatgaatgattaggagacttctaaataccctccatgaaagactagaaatcgtttatgtaaagcattgtggacgacataggcttgaggctctggattatgttatctcttggaaagagtgttgggttttattctgggacggttgaatgtaggacttgctaagttctatttcagctttgcccttcctcttagggagccccagcctgtggtcatcattgctagtgcatggccttcccagggtcttagtgggaatcacagtgtattcgccacatcactccactgcaactgggtctgaatgccctggctcttctgaaatctctgcccatgtcttcagccttccagaacttgttctctgctcagccttctggtctcccacccttctgcatacacaatttaggatctgactcaggaaaaaaaagggggttttcttacatataatttttgggttcctttttagtactctgtgtcctaaatcccacgtgtcttggagtcagttatgtcctatcttcagtcacatatactactgctatttggtacagacatgtttacttgactttacttcacgtttgccattccactcttcactcttctttcttgcaattcagacagtcctgaggtcattttccttcttcagatccatcccatattcagatgacttaaaatcacctgtcacccatgctgtgctttgagaaatgtttatgttagctactgacatcagggcagtcaagcctctcattgtcattgttattcaaggtaggttgaattccattaaaaaataaaaatccttgaaatttggtttacttattgggaaccacacaatgatatcaaattctttttaattcaattttttttcttttgtggtggaagggccaagaattgtttccttgctgaagcagactcctatcataataatttgaatactaacaacgttattttaatactaacaacgttaacctttaaatcagattgatgttaggttcttatctaagaatgaaatatatccaaccgtagcaggttgaaggtctctcatatatgtaacctgttcaggacgagataattcaaccactttccttaaactctgatctaaatgcctttacattctttgttttaagggccacataaaaatactctgaaacaatttacacatcagaaaaatgctaatactttcctcctggcccagcacatctccaagttaaaaaaatctctaaattctcaacccatagtttaatcatggtaactcccttctacccccaacatagatttttatgtaactgatttgtaactacaaccctaaccctacaatcacaattgtcattacaaaatactaacaaacatgtgctattaccaatagatggttaaaatcacttagggattatgaatcatgtcattcttgtatttatttgtacttattctttgtgtttatttattatgtcagcttcaagctgatttccctttcccttgctccccacaccttttgttgttccttttcagcatcctgtgtatgttagctctaagcccagccaagccccatgccctccacttcagggacagagggtggctcatccctttcgtgctccctcagctccctccccagtgcctggtggctggttggcatcacagccatgcccttgaataatgggcgctggtccacactgcttctgtggtcatgcagtcatcctccctccacagagctgggccaaaaagggctccactgcccttaggcattgagggaatggacattctgagtggcactgtcttgtgtgatcccacaggacagaaggagattccatcaatgggagtagtctgttgctgagagggatcctgaaagatagggggacagagacacactgggaggatccacataaagaggaagcagctgagaacaaaggagcccctgccagaggaatatccttggggagtaaaaagctgactctgccctttctccccagcccattcatcccagcccagacaattcaaatctaccttctatcaggacctagaaaggatgtaaaacggctgggtataaatatcccctgggtctggggaaactgtcaggagcagtgacatcacaggaaaaaccaccaaccaaggccaaggagaccagagcccagcacctcacccagaggaccccagtcagaggccccatctcagacccgaggctagcatgggctgcaggctgctctgctgtgcggttctctgtctcctgggagcgggtgagttgggttcacatcagctgtccttgaattccaagctttttccttgtgatttcagcaacaagcctcctcctgggctctgcctgaattttgtccctttccccccacagtccccatggaaacgggagttacgcagacaccaagacacctggtcatgggaatgacaaataagaagtctttgaaatgtgaacaacatctgggtcataacgctatgtattggtacaagcaaagtgctaagaagccactggagctcatgtttgtctacagtcttgaagaacgggttgaaaacaacagtgtgccaagtcgcttctcacctgaatgccccaacagctctcacttattccttcacctacacaccctgcagccagaagactcggccctgtatctctgcgccagcagccaagacacagccttgcagagtcaccgctttcctgtgcagaaaccttaggggccctccaggaagctgtgggggccaccaaagccttcggtgaacatttcctgcaagagccccgacagaagattcagaacatcatagcacctgctcattcatccatgtggcaacgttacatcctatgctcatatttagagtgtgggttttctttagcgtgtgactctgccctgttaactgatttgaaaaatgataaacacattcagatctagtctttttaaaatccctttttaaattgtaaaataaagcaagcatgctataaggggattgtttggtttaagatgttataagaccctctcaacaaccacctgcgtcactacagagtcataccctgcactggaccacagagtgtcctgtgaggagccaagttcttctgacactttatgcctggtggtctccatgcctctctttctcagtaaccaggggtccattctgtcataggttgctgacacccaaggtcaagcagcactgggtttgggggaatcatagaggcaacttccaggcaagggtcccagggcgggagccagctggagagaacagtagacaactgagcttttggggaatgggtttgagaaatatctgtcaacccaattctattattctatcttccatcttgtctcttctctattgttcttatttaaactccaagctagagcgtaaattccagccctgatcaaagctccatatccctcacagacaccttctctgaaccccgcaggcagcaaatgtgcctctgtccactcccatttgtgtgggcggtaagccacccaagtcctgaggcaagagaccgagggcacgagctgttccagtataataaagaaaatatataaaataagaatagttatactagtaatagattatagatatgatggtatacaaatattatgaataatcagtttgtagcattactcttcattccaatattataataatccttgctctacaattataacctaggaaaaaccaggccatacagagataggagctgaaggggcacggtgagaagtgatcagaagacaagagtgtgagccctctgtcatgcccagacagggcccctagagggctccttggccttgtggtaaccccagagcctgggaggaagccccttgcctagaggaccttggtctagccttagcgtcagtgcctagaaaaagcacccattacttagccgaccaggaaagggagtctccctttccccgggggagttagagaagatattgcgtgtggctaggcttggtgctcacgcctgtaatcccaacactttggaaggctgaggtgggtggatcacgaggtcaggaggtcaagacgagtctggccaacatagtgaaaccctatctctactaaaaatacaaacaattagcgggttgtggtggtgtgtgcctgtaatcccagctacttgggaggctgaggcaggagaatcacgtgaacccgggaggcagaggttgctgtgagctgagatcttgtcattgcactccagtctgggtgacagcgtgagactccacctcaggaaaaaaaaaaaaaaaaacgataccgtatgtgtgaatgtgtgtgtgcctatgtgtgtgagtgcgtgcatgtgtgtgcatggatgtgtgtgtgcatgtgcatgtgtgtggatggtgtggatgtgtgtgtgtgtgtgtacgtgtacatgtgtgtgtgttcttgtggaaactcacccacatggacccaggttctctgggtggcattactgagaggtgctgggtcactggtagagctcataggcagttctggggagtgacaggaaatgtcacagccaattgaatctgcctaagttacagctgatagggttgtttatttcaagattttgtaagttcagaaatagatttataaaaaatccaagaattttctttctaaaatgcactacctaaaacttgctgataattcatttaaatacaaaatatgagaacatgggtctgattaatcaaaaggaacgattgaatacagtttccaggatagggctgtttgatatcttcacactgtttaaatctgtggcctgtatttttcaggctcctctcgtccatcctagcatactaattgcaatgctgtaacattgtttattttgcaatcaaaatgttggttaatgcttgcttttgctagctaaaggtgaactttcagatcaaccctatattggcccttctgggcaagtatacagagggtgtgtgtgagagggtggggattgcaggagtgagggcagggcatctctcttccttctctggacaatcttgagttcatcaggccaggtgtgaatccgtgagactgtggatctttggccacttggaggcgctgtagctccacgatgctgtaagaaaccctgggcagggctggagagtggccaggagaagagggttgaaggggatgcctggctgcctgctgccatcaggggccctttgggattccctgagtgggcctggacatgtggaattaagcacagacccctcactgccaaagaagggtagggatgctagagtcctcagtttgtaccaaggagggagggtgtctgcctctgcgtgggcagtggagggtgaaggggctggggtggcaagggctgggaataagtgtcaggcctgggacagggaggacacaggaaaggcaggtgtgatggggcatgtgggggctgtgctccacccgctccacctttagtttcagggctgtgtaagacaggaagatctcatggagtagcaaagcctgggccctgccaatggttgcagagtgcaggggtggccggcagagggagtaactgggaaaggccagttccccaaggaaatgccagaaactttcctgccccattcagaaagtgactgtgaggcgggtgcttccagccagaggggctcaggccctgctgagctgacagcgttttctttcccagacattctctgctgcttctatatgtgatctgttttaatgctcactgaaatcacaagtatttattattttgactgtttttgtatctgagggaaggcagctgtccctggtctcatatttaataactggctgtcgtgtgctctccaacacctctccaccctccctactcagtacatctgtcccgtcatctggcttcctctctccaggtcccattagcaggaggggaaggtcatgcctcctatgtgaccattagaacctcttccttgacaagtccaagaaacacgtgacttccgggccaagcatatccattcattcttcattgcagccaaaagaaagatgaaattttctaccctgtagactttctgtcactaatgcaatgtaccttgaggaaaagtaacatgaataactgttattcattagttaatttcttttatatcctttattcaataaagtctttgagaccctttctttgtatattttatgacataaaataaaaaatgggaaaaattgtttaataacaaatatttcttactttttagagtattaaggcttaaatttattttgttttattttagttttatattcaaagtactttactcagtttctgaattacaaaaatttccctttctttctctgtctctctttagctacctccctcattttttttgccagcattttaatttaatgtggtaggaacatgtaacatgagatctgtattttaaatagatttttaagtgtacaatacagtattgtaatctacaggtacaaggttgtacagaagctctctagctcttacttatcttgctgaactgaaattttatacctgctgacagcaactccccattttctccattcccagcccatggatatcaccatttttatctttgctttcatgagtttggcttttaggtagcctgctataagcagaatcagggagtatttgtctttctgtgccaggcttagtcacttatcacagtgtcctgcagctttatccatgttgtcacgagtgacggggttttcttctttttaatgcttaataatataccattgtatgaatataccacatttatggactttgactgtttctatgaaactgtctgtcacataagtgggagagtcatttgcagaactgaaagcttggattacatgaatgggcattcacatttcaattctactccatgggcaagacggagaataaaataatgattccatcatttactcttactttgctatacacaaaatagaagtcctgcttttgggaagtttcagttatttagaaattcgactgtcagaagaaaaccctaagacacaaatgcttttctcattgtacacgtgagagaattggctcattggttaaataacctgaccaaattaaatagctattaggatgcagtactgatcctccaaccctgcccagtctaagttccatgtttatagctctatgctataaaatatttcataaagctgccaacctagaaaacattggaaagttttcccctacatcccctttaggcctgctggctctaatagcatcatagtcagagatcagtttaccctggagatggtggagtagggaaagaagtctgaagaggcaccatgactccccgccctgactcccactctaacaccagctcatcaagacctgaggccagttcttaacgggttaacttaagtttttcagtttttttttacctataaaatgagactactactgtccatcagcagagttctagataacctttaatggcataaaatatctagcatatagtagaagcctagctattttgatttcctttgctgatctcagacaacctcgtccaccacaccaatgtgcaaagacagatatggacacattctgccaagaaatcttaggttgagggctcagaagtcacagaaatggaaatatatatgcctgataattcatctgataaaattaactagaggatgtagcatacatatctcctcaggcatttaaaaatcaacattattgatctataaagtatatgaagttaacaggacaccttttaaatgaacatatctgtgatttttgagcaacatatatctatatatgcaaccccacctctatgaagatgtatctgcatcacccagaaagtccctcactcccctctgcaatgcctctgtctgtcccagcaaccaatgatgtgacttctatcactggagagtcgttttgttggcaaatatttttaatgcaaatgtcaaacctcttctgaatagtcctgttgaatacatagctaaatcatcaaggcagggaggagttcctgggaggttttatggttttagaagtggttgaagctaggtgagctacctgacccatggtagggacaattctatctggagatggatgttgtgccgaaataacctcaaaaggtcttttcggctggtagaagctgattctacaaaatttattcattttcattcgtttattttctcgtcaattcattcaatcaaacaattttatgttacgttttgacaaaagttaatcatctttaaggaaattattttgagttcccatcagacacacatgcagctgggctttgtgttcacacagtgagcatgctggggtcaagcaaaccatgatcacagtgacttcattgacagatgatgtcttattgggagaagggttctctttgacttgaccccatgtgtccaacccataaaacctgagccttaggctaaaatccatcttccttttcttaccctgccttgggcaccaggccactgtgctgtgtgtttctctgtctcctgaagcagagtcctgggcgcagatttggaacctattcgtgggcttgtttgatcccagctgtgactttcagtaccagggggtcctttgctgtgacttgaatttgtgttttctttactcttaagttccacagatgctgagtgacccagaccctggtcatgctcttgtgctgaaaggaaaccagcacacggggaggtgagcagtatatgaaacaaaatcatgtatttacaaccagtggcaagacttactggcaggtgctttgttcaaacactgttaggaatttgaagatcatggcagtagaatgtgaaaccaagtgcagggtccttccaaatgcaggcctctgtgcaccaaagatagacttttggagctcattttttttaaacaaaaacggaaacaacactctatgttcatggctgtaggccatgcgagaatatttttttaaattttaatttaatttttatttttccatatattattggggtacaggtggtatttggttatatgagtaagtttttagtgatgacttgcaagactttggtgaacccaccatctgagcagtatacactgcaccatatttgtagtcttttatccctcaccccctcctgctgtttccccaacacttccccaaagtccgttgtatcattcttatgcctttgtgacctcatagcttcgctcccaaatatcggtgagaacatgctatgtttggttttacatttctgagttacttcacttagaataatagtctcccatctcatccaggtagatcattccaaatgctgtttattcattcctttttatggctgtgtagtatttcatcatacatatatgatatatatatatgatatatatatgatatatatatcatatatatcatatatatatgatatatatatatatcacagtttctttatccactcgttgattgatgggcatttgggttggttcctttttctttatcactaaattaatggcagcaataaatccagaacattccttattaccctaaagtcagccctgtctcccaaactcccttacacatcaggacacctttgtgcccatagatcatgggcagtgcttggcagccaccactgtgcacacagagagggtagtcagtagcgttaggtggttctgcctgctggggtctcaccccaggaacagaaagcaggagccctgggtggagctgaaagtgctcatctgggtttgtcaggagtcccatctgtcagtgaattcacaagaaacagaacaaaacaactcttccaatgttgatgagcctgcccctgggatttggaaagctaataacagagaaaaccaatatagacaaaagattttaaacaggactatcggattatggtcatttaagcaaattagaaaaggatacttgaaggagtatttgggacacaggaatcaaaaacaccaggaagacatgaggagtttttccaagattgtagactatagcaatacttagataaccaataccagtgtattaatgagtaattattagtattattattttgagatggagtcgcactctatcatccaggctggaatgcagtggcatgatctcggcttactgcaacctccgcctccctggttcaagaattctggtgcctccgcctcccgagtagctgggactataggtgcacgtcaggatgcctggataatttctatatttttagtacagatgggatttcaccatgttggtcaggctggtctccaactcctggcctgaagtgatctgctctcttcagcctcccaaagggctaggattacaggcatgggccactatgcacagccaagtaatttgtatcatcatgggaataaaaaatatacattgagttacaaactaattaccaaaagatatttaaaaaatggtagacttgcatcgattcagacaaaggcattcttcccatccaaactgttcactggtgcattgatcttgaatttgaccatctggggaaggggcgtggcctctcctgacagcaaggctctggggcccaggcagggagaatgaggtctcagaatgacgcccttgaaagacgtgttcccttttcaccaatgcacagacccagaggacccctccatcctgcagttcctgccatgagcctcgggctcctgtgctgtggggtcttttctctcctgtgggcaggtgggtcctgggcggggccccttgtgtggatttcaaggcccatcccctttccactggagctgtagcatcagctttgtccttctctgcaggtccagtgaatgctggtgtcactcagaccccaaaattccgggtcctgaagacaggacagagcatgacactgctgtgtgcccaggatatgaaccatgaatacatgtactggtatcgacaagacccaggcatggggctgaggctgattcattactcagttggtgagggtacaactgccaaaggagaggtccctgatggctacaatgtctccagattaaaaaaacagaatttcctgctggggttggagtcggctgctccctcccaaacatctgtgtacttctgtgccagcagttactccacagtgctgcacggctgtctcctctctgcacagaaaggcaagggaaggtgctgccctcctccgcagcacagattcagcgatgcccttggtcctagcaccgaaaactttggagccccaatgggcccgggcggtgcgagccttcatctgtgccaggtgcctctgcagtcggtctcggccaggcctggatcggtcccaggacctcagatgtcttccttgttgccctccggtctttcctctgaggtgtccttttgggctagtgccaggggtttcccagctctgactttcctagtcattcacctgagtctgaggcctcctaggtgaaataggatttgtatttcagatccatctagactcccgtctctacctgggtaccacgtgctttcctctctctatgatttttcctcatgttgaaccctacggtggtctcagctgcagcctgcatttcctatattcacagtcgccctccaaggccttgctgggtttctcctccccgacctccctgcccttctctactccagccatgttgagagactccaaagtccatttcctgtgccctgggctggagccttcctttctgtagtggtcaacacctacctgtgcttcagatctcagcatcatcagccctagtgataatcaccattatgcttcccttggctcccagctgaggtcagtttccctctcataatctctcatggtatcatgtgtctgttaatcagtagaatttagcacagttggaatcttccaagtactttaaaccccatgaaggccaaggctatgcctgggttataaatcagcagctgagcctggcacaaggggagatgcatttcagagaatggatgagtcagtgatggagtgagtgatgagtggatggatgaatccataacaggagcaccctagatccattttacccttgcggagatctggctgtaagtacaagaactcttacccttttgattgctgggctacgggaggtccttgaaattaatggggagtcgctatcatgggcggccccaccttggtcaaagattcctcctgagtctgcagcaccagacctcctccaggtctctgtgctctccttcagactctttcccacaacaactctacacagatcagagatccctttccagaaacccatgcatagagttgtgttattttggaaccacttctggtaccaaaaactccattaggtttacatcaataaaacagaatcactaaaagtactatggagaggaggatttatgacaggagttagaccttatataaatgtagggggagctgaggaagagaaggtctggaggggagatatagctaggcagatttaattcatgattaatgtgaccgtgacctcttattctactcaaaggagagcatatgatttcaacaaaaaaatattgattttcctttgtaaaagtttgatccaaatagtgagctatttttgtcccataattgtcttaagttggctaatggtggaacaaatccgactttgatttccttgaaagaacaggaaaaaaaccgtcattcatatacagtcttacaggctctattttatggaggaagcataataaataggaaagagaaaatcagaattctcttctggaacctacattgggactgtcctcagagcaggttgtgatgtgaggaatcaaatctacaggggtatttcgcagcttggagcgcagcagactgttcccgaccccatgcatttgggggtgagaccagagacagttgaaaaactatggaatcttgacattctgcactctcaagcctggcctctccctgaatttcacagattaacatcagaccaatttattccgactattaaaagtattagaacaaaaaccaaggaggaccagtgagcagaagcaataaaccattaaaatggacatcctaaagatttaaaattttgccatcataagatgtgaacgtttgaagagctgcatttaaatgaatacaagaagggactgaaacaagaatacacacaaaaaagagacggcccgaaaccatcaaaaaacattaaagaaataatcaaatagaatgtctagaaatcattacgattactccacaaaacaaaatggaagctaaacagcagattcaatgcttctaaagagattgttagcaatatcaaaggaggatctcaagaaatcacctagaatgcagcacagaaaattaaatgtaaaatataaaaaaagtgaaggaacaaggaaaaaatgaagtttctagaatattagaaagcatataatgttttattgaaacttttcttactttcttgtatataactgacgtttcagaaagagaaaataaggcaaatgatctgaggtgattgtgtatgtgatgctagctgagaatgttcctgagatgtttgaggaccgaaatcctcgttcaagaattcagatgaattgcaagacaagtaggcaggtccctgtgaaactgcagaccacaaatgacaaagaaaagattttaacagcagtcaaaagggaaagataaatatcctccaggggaatagaaagaaagaaataatcaaagtcaagaaagaggattaaaaataactgttaaatcagaattgagattgataaaaaatacctacaggacaggacaagaaaatatggaaaaccaaaataattctgtgagtttgccaccaaagtatcttttcagagttatagttaacaagggtgggaaatgatcccagaagaaatgtatgagggcagtttgtgagggaacccatgtgatgggacaatcccgttgggcacatgtgagtgggggaatggaggaggctggggcatgaatggggatggcagaggggaccctgacttggaggaaagacaatgagctcatcccatggtgcctggtgttgggggcactgttggcacatcctacagaacgtgctcagcagacagaggagcggctgtgggatgagaaggtgaactcggagatgcagcgtgaggcctccaagtccagacagcatgggagcccaaagcgatgtcccatgcaataacgttgtttacaaggagcttataaatatttaaagtagtcacccaagtgtggtctaatataaatcctgtgttcctgaggtcatgcagattgagagaggaagtgatgtcactgtgggaacttccgtgtaaggacggggcgtccctcctcctctgctcctgctcacagtgatcctgatctggtaaagctcccatcctgccctgaccctgccatgggcaccaggctcctcttctgggtggccttctgtctcctgggggcaggtgagtcctcagacaccaaccattctcattgtgtgtgtgtgtgtgtgtgtgtgtgtgtgtgtgtgtgtgtgtgtgtaggggtgggctgtgtgcattcgtgtgatgactaaaattattttcctcattctgttcccaactttgtctccacagatcacacaggagctggagtctcccagtcccccagtaacaaggtcacagagaagggaaaggatgtagagctcaggtgtgatccaatttcaggtcatactgccctttactggtaccgacagagcctggggcagggcctggagtttttaatttacttccaaggcaacagtgcaccagacaaatcagggctgcccagtgatcgcttctctgcagagaggactgggggatccgtctccactctgacgatccagcgcacacagcaggaggactcggccgtgtatctctgtgccagcagcttagccacagcatggcacagtcgcctccttcctgctcataaacctcatccttctctctccttgcagctcctagacacccttaacagaggcttctctttgcttctccctccccatgggaaacaagtagatttggacctcagcttgtcctttgggtagaaagagaccacagatttacccttaagacacagtaactgtaaatgtgggtggtggaagcaatcgtggcccaccgggctattggagtcctcagagccagctcattgctctaaggcaagcactgggtgtcttagccttggccttcagggctgggacacacagtcttctttggggcctgggaggttgctgcccacatagagaagcttcgggcatggctgaggaacaggtgtcttcccctacatgtgttggggcatctgcaaggtctgaagcttcatccacaagaacattctttcttctgaagcctcttctgttacattggaagttttctgcaatacaagagcaaaccattcttcctgtttgatttaaaagtctttgtggcttttgtggccattacttggtgaatacagccaagataacaataagacttcgtttcttctgcctagtgtaagcaatgcgagttctttattttgttttcatttaccactgctcctgtcctgagagactgaagcatgcgtccactactgctccagtatcaacttggttccctaggaaatcgggtttctagaacctgaatgctgacaaataagagttgtgtacatgtataccatgcaacctgcgtttaaaaatgtatgtacatggtgaagtgactaaatctagctaattaacatatgcagtacctcaatccttatcctttcctgtggtgagaatacttgaaatgtactctgttagcaatattccagaatacaatccactgttactaactttagtcactgtgttgtacaatagatcttttgaacttcttcctcctatttgagtgaaattttgtatcctttaaccaacatctccccagcaccccatctccatcccaacctctggtaattgctgctctagtcttttgatttgaaataatttccctgaggtctttaacttgagaagatggagttttaaaaacaataatgcttatattacttttgttttgtttgttattttacatattgcaatatagtgtttgttgcaaatataaatgagtatactgtaataaaaattcttcacctctctttgagtgaagctacatttcacatatatgaaatttcaagctgtggtcagagctgacatgattatggatcatgggtttctgggagtcctcagagacagccctatacacaaaggttaagatagattatcccagacccagccaggacagaggtgccctgagtcctgcagagctggttggggaattatagttccctaaattcacttatcagaaattgtggtagctcagataccaaatttctttctctagcaaatgatgatcgttggcagggattgttctgaatccattctaattgttctatcaacagatcattccttttttagttgccctgtgtgtcctgggagtgaataagtcccaggcacagatgggaatttcctgaccttaggatgctgttccaaggacttccttgctagaccctgtctccagcttttcccacctttatcctcatgacccctaagacaaatggtcctaataatggaccagctctgaaacttaagattgaacagaacacaaaccacaactgtaaacactgatgctgaaagaagtggtaaaaaaaggtgagcagggtttcccacctgcactgagagttaacatacaaggacagcaaagggaaggttttattaataagcaaacaagaagcaataaaggccctgctccattgaatgtaactaatctctttgagttaaaaaaggagcacgtcaataaaagtatttcaaatcaaagtctagaagtttccaaaccagccagcacaaccctgagagctctgtgctctcagcaacttcagagaactcatcaatcctttctgggctcaaacttccctttgtccactcgaagacccagggtcacactctcatcctattacaaaaacaatgggctttgctatcgttgctgatgcctcatttctaggagttgagtattaagcactgaagagctttgaaagttgggcttctgagtcaattgatgtgctggagccaacttttctgactcacgagagacaaataggcacactcttcccagctccccattcagtgaagccatgttgacagcttgaaatccaccatagtgcctgtgttgatacaacagaaattggtaagtactactaggcatgtgcccacctccacagacactcagtgtaccagcacatcactggaatgttttctgagacagtgatgtccctgttatgtcgtcatgtcttgtggggccaaaaggactccgaattcacctcctctctgttcttgcttttagaaaccataatctaaaataacctcacctgacactatttctattcaatctccaaattccctcactttgtgggtctgtgtctcctgtaagcatgtcagtccacaacttgacaactattttgaatgtagctaaaggatacagtgaaccagtttattattttcaaattatccttccttgcatggaatatgtagatgctgcagtcattgggaacagagatggggcaagcagcagctctgggccgtgaaccactttagagtcagacaattcttcagtggcacagacacacccttgggcatggactaatttgctttggaaactaagcagttccacaccagtcaccaatgaccttggatctatttccagctgagaggtcaaaaagatcacactacctaaatgtcctcctctccaatatatagtacagcccccatccatctcagtccctggaggtcatccagagctcccagagaatctctgctctggggcagaatcaccacgtctcctcctcgccagctccccacaggctccagcaaggctttcctgccaggtgcagggcatgggtgtggctctgctgtctctcaggtagagggaggccatacgatgatgtttgtataagaaggattgggtttcagaggttcctctcaaatacttgacataattttatttgctttttgtttcactctacaatgtcaccatttaggagagcaattattttggttgcattatttatggaactttgaaagatttttgtggttaaattaatttaagaaatcattcccattgtgcatcttttctgttcagatataatctgaggcagtgaaagaaacagcaatgattctgaaagcagtcacttacatgccctctgataaaggcattgttcaaggttcattactcacacctaactttcagtctactggaaatgaaaggcacagagttgggggcctgtgatcaagccacaagagaggactataccagctactctgggacttcagggcacgaagagatgacctcccctttagactctgctcaacgacgaaggaatgagttggtccatgggaacctgaggagcagaaattccgggagcctttaactgggacggagcaaggactgtagagcaagtcattggaaagggaaatggttcatctggtctgtcacagaagatagtggatagaaaggtcatataatccccagttccctggctgatttgcttccttatgatactattttgcagcagcgtaccgtcatctcacaccactcctctacctcttccagaatcatctcctccctctctgctgctcagatcagcacatgtgcattgcacaagctattcttttactgtagcagaccttttgctggtcttaattatatccatccttattttcccattagatactgctccctccatgattgcttattgccttgcaagggatcctttaccccgcgcccccagacagagtctcactctgtcgcccaggctggagtgcagtggcgcaatctcggctcactacaagctctgccttccgggttcacgccattctcctgcctcagcctcccgagtagcgagtagctgggactacaggcgcccgccaccacgcccggatgattttctgtattttttagtatagagacggggtttcaccgtgttagccaggatggtctctatctcctgacctcgtgatccgcccgccttggcctcccaaagtgctgggattgcaggcagaagccactacgcctgaccaagggatcctattttttatatcccagttttactttttattaacacatatctgaccccatcttgaaggtaatcacattatctgcctagacttttgctaatctttatttttatggtaccattgtcatttggggggacatatttgtttatctttggtaatggaaatgaaattacgttacacttcactttctgtgttttcttcctactttagggtaaatattatttccttctattcttcctattctattcctctctctttagatagttttaagggagaaaatgtcagtgagactgtaactgcagctatggggtaagaattatttagaatgagggtgggatattaagcttgataactcaaaggaacagtcagggttaaaactaatgttgggatcggggttcagagaagttgcttgtaaaacctgcaggatggcacttctggaatagtctcccggctccctctgcagacacttcccagcatcccttgggccatttcccttgcaaaagcaatgatgaaatttcacttattggccacaagatggcactgtggtccactgggctctaagagactctggggagagcctgggagagcagcctaggaaggaaagggttaagaaaaatcagggctggcatccaatatcatgcagatgttgcagcagttttcagttattgctagactacctacagttatacaacatacaggaaatacctctaatctttaatgagatccacagttgaagaagtttggcctggcagccttggtgtcaagggcaggtgcagacagaggagcaactatctcagaggaaaatgggaaagtgaggggtgggctgtggcttaagcccagtgcgtctctgctgcaccccgtcttccctgcagctcttaccaggcaacagcctccatgagagtaggtggatcctgcctgagcccagtcagaatgccccggactaggtgaactctgtaggcatggggagtaacacaacaggcccacctttcacacgttttttttttttttttttttttttttttttttttttttttttttttttttgagacggagtctcgctctgtcgcccaggctggagtgcagtggcgcgatctcggctcactgcaagctccgcctcccgggttcacgccattctcctgcctcagcctcccgagtagctgggactacaggcgcccgccaccacgcccggctaattttttgtatttttagtagagacggggtttcaccgtgttagccaggatggtctcgatctcctgacctcgtgatccgcccgcctcggcctcccaaagtgctgggattacaggcgtgagccaccgcgcccggcctcacacgtttccaaagtctgggctccaagcctttttttcccctttcctctgcagagtcctgccacttctgaagccttgtcctcactttctgcctgcctctcccacagcccccatggaggcagggatcagccagataccaagatatcacagacacacagggaaaaagatcatcctgaaatatgctcagattaggaaccattattcagtgttctgttatcaataagaccaagaataggggctgaggctgatccattattcaggtagtattggcagcatgaccaaaggcggtgccaaggaagggtacaatgtctctggaaacaagctcaagcattttccctcaaccctggagtctactagcaccagccagacctctgtacctctgtggcagtgcatccgcagccctgcacagccaactgctctctgcacaaaaaagggcagccacaggctggaggtgggcactccttcccaaggcctctatctcaaccaggagataaagatgccttttttgaagctcttctcagatgtcccagcaatgggctcccagtctgtgcatcctcctgcagcaggaacttcagtgtgagctgaggtccatcactgtgatgtggatgcacgaatgcaaacaacacttaatgttattttactcaattcagaatattctggcagttgcgtaaaataggaatagtagctcccaaaatgaaatttgtgtctcattttctttatgagagaaaagaaaaaaaaacagaaagcagctgggcagctttaacctgcttgagtgatctgggattctacaagtctacaagtggtacaaagaacatcaccttggcctggattccaatggataccaaacactacaaaaagtattgaaaacaatttataaaagacctaagtaaacaatctacttataggaaatgttagtagatccatcgcatagtgccattatacctgacgatgatcaactagtgaaattattatgtagagattatcagctaagcctctacttattacctctgagcatagagcagtgtttgagccttctgagggtatcttaaggaaggaacttaattcttaccattactttggcttggattaaaatccatgagcttgtcgtttttattgtaaaatattacagaataataatgatcaaacgttttattttcctctagcgtttattcctctttagaacgtgcaggttgaagctcacacacatgagcagggttccttaagatgagatccattaactccaggactgggaggtacacagctggccttcacaggaagtgcaaaccccaaatgcagtgacccctcctgtgtctacgctgtgcccaatacccctctgtgaggctgccataaaggcgggcaggctccttgcttggcaaaaaaatcagttcaccaattggccactttgctgaagaccagaataaaaggctaaattgtgagaatgatgaatgcccaattcccaaattgtgaaatgtgtaacagttcacgattcttggaataatttcaaccatgtgtggtttgttttttttttaagtttttctttgtcgacagctttctttcggccactgatcctcagttgtttcccagccgccttgtcagctgatctcattttgatgctaatttttttttttttttgctagctttgggattatttgttcttgttttactatgtcctctaagtgtggtggtaggttgctaatgtgagatctctctaacttgtttatgtgggtgtttcgttctgtaaacaatactcctaacactgctatagctgtgtcccagagattctagtatatttaatcttggttttcattagtgccaaagaatgtcttgttttctaccttcattttatggcttacccaagtcattcactagcagattgtttaatttccatgtaattgtatgattttgagagatcttataactcttgatttctattttttttgtgctgtggtccaagagtatggttgacatgatttcagttttttttataatttgtttacaattagtctgtgtccaatcatgtggttgatttcagagtatgtgccatgtgtagatgagaagaatgtgtattatgctgttattgggtggagtgttctgtagatgtctgttaggaccacttagtcaaatgttgagtttagtttatgaatatctttgttagttttctgccttgacaatctaatactgagtgttgaactcttccagtattgttgtgtggttttctacgtgtctgtaggtctctaagaacttgttttatgaatccagctgaaccagtgttgggtacctatatatttaggatagtgaggtcttcttgttgaattgggccctttatcattatgcaatgcccttctttgtcatttctgataattgttggtttaaagtttgtattgcctgaaattagaatagcaacttctgctcttttttgtttcccattggcttggtcatttttctccatcgctttatgttgagcctatgggagttgcatatgagatgggtctcccgaagacagcatacagttcagtgtttcacttgtctatacaactggacgctctttttttttttttttttttttttttttgagatggagtctcgctctgtcgcccaggctggagtgcagtggcgcgatcttggctcactgcaagctccgcctcctgggttcacgccattctccggcttcagcctcccgagtagctgggactacaagtgcccgccaccacgcccagctaattttttgtattttagtagagacggggtttcaccgtgttagcccggatggtcttgatctcctgacctggtgatccgcccgccttggcctcccacagtgctgggattacaggcgtgagccacggcgcccggcagctcttttaataataaacgacttttatgtgctgtgtttagcctgtttacattcaaggttaatattaatacgtgtagatatgatcctgccattgtgttcttgcttggttgttatgcagacttgattgtgtagttgctttataatgtcaatggtctatgtacttgagtgtgttttttggtggctgttagtgatctttcatttctatgtttaggactcccttcaggacctcttgtaaggcaggtctggtagtaacaaattccttgaacatttgcttgtctgaagggatcttatttctcctttccttatgaagcttagtttggctggatatgaaatatatagggatactggttggaatttcatgtctttaagaatgttgaatattggctcccaattgtttctgccttgtaaagtttctcctgaaaaacctgctgttagtctgatgggattccctttgtaggtgacctgccttttctttctagctgactttaatattttttctttcatgttgaccttggagaatctgatgactatgtgtcttgggggtggttgtcttttatggtatctcataagaattctccgtgtttcctgaatttgaatattaaactctctagcaaggttagggaattttttgtgctcaatatcctccaatatgttttcaatgttgcttactctctctccctctctttcagggacatcaatgagtcataggtttggtctttttacataatcccatatttctcagaggtttacttcattcatttttcttttttttccattctttttttgtctgactgaattgattcaaaaataagtgttcaagctctgagattattttctcattgattatgctgttaatacttctgattacattatgacattgttgaggttagtttttcagctctatcagatcaattttgttctttcataaaatagctatttcatttttcagctaatgtgtcattttattggattcatcagattccttagattgactttcagctttcttccgaatcttgatagtgtttgtttctaacctgtttctgaattctatgtctatcatttcagccgcttcagcctggttaagaatcattgttgggaagctagtgtgttcatttggtgctaagaaggcactctgactttttaagttgccagagttctttcactggttctttctcatctctgtggtctgaggtttctttaatcttttaagctgatgtcttttggaagggttttttgcttttatattctatgcccttgagggtttcactgttacataagctgggttcaggagactggcttcatttatggaatatttcagggggctaagattcagctcagtatgtctgggctgcgtgttgtaggcctgtggtgctggaattaagcccagagctttggtttttgaccccttaaggttaaagcacctgctacaccagaggggctgaggcgttcccaattccactggcaacaacactgcaatggggaatgccagccaaagtactttttccaaatggtggcattggggtacatgctcagaagcatgtgccaataatggcaatgtggcagtttccatacatatgtttgtgctagcttttttattattatatagtaaacttctttgcctctttttatagttattgtcttgaaatatattttatctgatatagatatagctactcctgatcttttctggttttcacgtgcatgaaacatctttttgttatctcttcactttcaatctatatgtctttttaggggaggtgtgtttcttgtaagtgacagatcattgggtcttatttttatattcattcagctactctatgtcctttgattggtgagtttagatcatttacattcaatgttattgttgataactaagtactggctcctgccatgtatttgttttctggttgttttgtggtcttctcttcatttgtttcttctttcctgtcttctttttagtaaaggtgattttccctgataacgtgttttcatttcttgtttgttatttttgtgtatctgttgtatgtgtttgtatttaaagttactacgttgcatatgtttgtatttaaaattactatgcatgaggcttgcaaataatatcttatactgatgacaacataacactgattgcctaagcaaacaaaccaaaaaaaaacagagaaaactagtaaaaatcttatattttaacattgtccacctacctttcaactttgtgtcatttctatttatatcttaggcactgtctatgtcttgaaaagctgtagtttttttttttaattggttcatcttttagtctttataagtagtttacacgccgtaatcacagtattataatattgtgtttttcttcgcactattatcagttagttttgcacctgcagataatttcttatttctcattaatgttcttttctttcacgctgaaaaattatcttttgcatttcttctaggacaggtctggtgttgaggaagtccctcatattttgtttgtctggggaagtcattatttccctttcatgtttgaagggtattttcactgagtacactattctagtattaacgtttttttttttttagcattttaaatatgtcatgctgctctctcatgacctgtaagatttgcactgaaaaagtctgctgctagactatattggtggtccatggtatgttatctgtttcttttgctgcttttagaatcctttctttatccttgaaattttgatttatccttgaagtttgattattgtcttgatgtagtcttctttgacttaaatatgcttggtattctataatcttcttttacttgaatattgatatctttctctaagtttgggaatttctctattatcatagctttgaataaactttcagccctatctctctctctacctcctctttaaggtcaataactcttaaagttgcccttttgaggctatattctagatcttgtatttgtgcttcattaatttttatccttttgtctcctctggtggtgtattttcaaatagcctgtcttcaagctcactgattcttctgcctcatcaattgtgaggttgaaaccctgatgcattcgtcagaatgtcaattgtattttcagctccaaaatttctgcttgattgtttttaattatttagctctcttccggattctgaatttcttggctgtgttgtcttgaattttgttgagtttcttcaaaacagatattttgagttctgtgtctgaaatgtcacacatctctctctctctctctgggattggcctctggtgctttatttggttcatttggtgaggtcatgttttcctgaatggtcttgagacttgtggatgtttgcctgtgtctgggcattgaagacttaagtatttattgtagtctttgcagtctgggcttgtttgtactcgcccttggaaagcttttcaggtatttgaatgtacttgggtgttgtaatctaagttttctatctctgaaaccttatctgcattagggagcaccccaagtccagtaattctgtggtccttgtggactcacagatatactgccttggtggtcttggataagatctgaaagaattctctggattatcaggcagagactcttgttctcttccttcactttcactcaaacaaacatctctgtctctctctctgctgaactacctggaactgaggagtagtggtacaagctccctgtggctgccatcactgagaccctaggtcagaaaaagccagcatgataatgggtctcacccaaggtccacagtaaccactgccttgcttgttgcctatgttcaaggccccagggatctacaatcagcatgtggaaaagtcagccagtcttatacccttcccttcagggtcacgaggccccctgaccccaggcacatccagagatgttatccaggagccagggcctggagtcagaaaccttggggatctaactggtgctctattctgctgcaactgagctggcattcaagtcacaagataaagttatttccactcttccctgccctttcacaaccagaggagtctctccctatggctaccaccgccccaggcccacagcaagaattgcctgactattgccaatgttcactcaaggcccaaggactctttagccagcttgtggtaaatgctgccaggcctgagactcttctttcagggcaatgggctctcctctggcccaggactggtccagaaatgcaatccaacagcaaagtcctggaatccgggaccccaggagcctactttgtgctctactccactgtggccaaggtggtagctaatctgcaagacaaaggctcctttattattccctctccttttatcaagcagaaggagcctctcctcatattcatcacagctgggaatgtgctgcatcacacctgaaaccagcatgtctcagattctcacctaagctctatggcaagtactacctgggcattgctgctgattattcagggcccaagtgctctttattcagcagatgatgaatctttctgggccttgttccttccccacaaggcagcaggttcccttctggcccatggtgtgtttagaaatgtcatccaggagctagggcctagaattggggcctcagtactctgctcattgccctatctgactatggctgagctggtgtctgattttcaagaaaaagtcctctttactcttccctctcctgtctttaagtggagagaaggtatattaggccattctagcattgctataaagaatacctgagactgggtaatttataagaaaagaggtttaattggctcatggttctgcaggctgtacaagaggcataacactggcatctgtttctgggaaggctccaaaagcttataagtatgcagaaggccaagggagagcaggcgcatcacatcgcaaaatcaggagcaagagatagagagtggagggtgtattagtctgttcttatcctgctaataaagacatacccaagacggggtaatttatttaaaaaaaaaaaaaaagaggtttaatagactcacagttccacatgtctggggaagccacgcaatcatgacagaaggtgaaggaagaccaaaggcatgtcttacatggcagcaggcaagagagctttcacaagggaactcccatttataaaatcatcagaactcctgagacttatttactatcatgagaacagtatggagaaaaccaccctcatgactcaattatctccacctggccctcgccttgatacatgatgattattacaattcaaggtgaaattgggtggggacacagagccaaaccatatctgagggggagctgccacacacttttaaatgacaagatcttgcaaaaactcactcactatcgtgaagacagcactaagccatgagggatctgcccccatgacccaaataccacccaccaggccccacctccatcactggggatgacaattcaacatgagacatgggtggggacaaatattcaatctctgtcattctgccttttttctctctcaaatctcacatccttctcacattgcaaaatacaatcatgcctttccaacagtctcccaaagtcttaactctttccagcattaactcaaaagtccaaagtctaatgcctcatttaagacaaagcacatctcttccaccttactagcctgtaaaattaaaaatatatatatttactcttaagatacaacaagagtataggcatggggtaaacattcttcttccaaaagggagaaattgggcaaaagaaaggtgctacaggcgccatgcaactttgaagcccatcaggagagtcattaaatctttttgtttgtttgtttgtttgtttgtttgtttttgagacagagtcttgctctgtcacccagactggagtgcagtggtgcgatctcagctcactgaaacctctgcctcctgggttcaagtgattctcctgcctcagcctcctgaatagctgggattacaggcacgtgccatcatgcctggttaatttccatagttttagtagagatgggatttcgccatgttggccaggctgttctcgaactcctgacctcaggtgatcttcctgtcttggccgcccaaagtgctgaaatgataggcatgagccactgcacccagccaaagtcattaaatcttaaatctccaatagttcttgactccatgttccacattcagggcacacactggtgcaaagggggactaccaaggtcttgggagttcttcgtctgtggctttccagagttcagcccccagggttgctttcacatgttgttgggtgttttggcttgtccaggcacagggtgcaagctgtcagtgacaatatcgatctggggtctggagggcagttgtcccctttccaaaactccactaggcaatgccccagtgggattctgtatggggcctccaacctctaatttcctctctgcatttccctaatagagattctctgtaaggtttccacccttgcagcaggcttctgcctgatcaccaaagattttccataattctctgaaatctagatgaaggctgccaagctttcttgattcttgcattatgtacacctgtaggcttaacaccacatggaagccaccaaggctatagcttgcattctccaaagtggcaactcaagctgtatctgggcccctttgagccacagctggagctggagcagctgggatgcaggccgatgtgttctgaggctgggcagagcagcaggaccctgggcctggcacacaaaactattcactcctcctaggcttcagggctggtgatgggaggtactgcctggaagatttctgaattgtcttcaggcaattttcccaaagtctttgctattagcacttggctcttttttaactatgttaatatctctaacaagtggtagctccacagcctgcttgaattcttctcccacaacattttctttatttgccacatggttaggctgcaaattttccaaacttttacactctgcttcctgtttaaatatacattccagctttcagtgttttctttgctctcacatctgagtgtaggctgttagaagcagccaggccacatcttcaacactttgctgcttataaatttcttccaccagatacactaggtcatcactcgcaagttcaaacttccacagattcctagggcagaggcaaaatgcacccaagttctttgctaaggcataacatgtgtgacctttgccccagttcccaataagtttctcatttccatctaagacctcaacagcctggacttcactttccatatcactatcagcattttggtcacaaccatttaaccagtctctcagaaattccaaactttccatcatattcctgtcttcttctgagccctctaaactcttccaacttttgcccattacccagttccaaagctgcttacacattttcagttatttttataacaatacccaacttcttgtatcaattttctgaattaggccattcttgcattgctgtaaagaaatacctgagactaggtcatttacaagaaaaatggtttaataggctcatggtttttcaggccgtacagaaggcataacaccagcatctgcttctggtgtagtctcaaaagcttacaatcatggaagaaagaaaaggggaggcaggcacattacatggtgaaaacaggaacaagagagagaaagagagtgtgtgggggagggagggaaggtcatttaaaacatacttttaaatgaccagatctcacaataattcattctctattctgaggacagcatcaagccataagggatctgcccccgtgatacaaacacccctcaccagcatggggattacaattcaacatgagatttgggtggggacaaatatccaaactatatccgaaggagtctcacctggagctgtgggctgtgctgcctgaggttggggatggggtggcataagcaatttcttggccaccccagctggtatctcactaggtcatgtgtccccaagtccactgactctgagttcagcacagcaccaagacttgcccaggaattgtagtccttgtggcctggactgtgtttcaagtttatttaggaccctaaggcactttagcccatggtagcgaggctagccagaactcaggttctgactgctgggataagtgattcccctctgactagggctggtctaaatgttcttccatgagtgctggctgagtcctgcctgctgttgctatccactgtgtgaggacagcaacgacttccaacacaaagtcccacagtcactgcactctccctaacccaaatgcacagactgtctctccaagccatatggccactgccaggggatgggggaggcatggtattggcaattcaagagtgtcttttctacctctttagtgcctctttcagtgatatgaagttaaaaccaggtactgtggtcacttagttgatttttggttcttatgaaggtgctattttgtgtggatagttgttcagtttgatgttcttgtttggaggaacagttaacgaaggcttctatttggccatcatgttctaccttcttcttaatcattctattgggtctgtagtgatatctctatgcatttttctataagtaattatatttacatttttttctgttttcattagtaatttctatctccttttttcaagtgtctgcttttaaatttgcctgttttaaaatcttacgttgtttgttcttatattactaatacgtataatatgtttgtattttttatataaaccttttgaccattaaatatattgagttagtcttctcccagagtggcctgcctttgtactttctgaatagtgtcttctcatgaactgaaattttctattttttgaagtttaattcatatatatttttccttttacagtgactactctttgcatttcaaggatatcttgcctataacagaattatgagttgttccattctgttacttactctactcctcctcattagtagccccatccctttttctttgtcatcacttgaaaatgctaaatctccaaaatcacaaattaaatattccactatctgcctacagcttcttatcctatcatacctgttctttgatattattgacatctcctctccactggtaaatattctttctatttcctagggtccctacagaatttctttactcattctagagcagatatgaggatgctacgtgttaaaaatcctagcttgcaaatagttattattttatattgatactcttaggcttccctttcatttacaaaaataaacaagaataaatgcactgatctctttggcatggcagaagctgaatgctgtcagagtaagtcacaccggcacaaactgttatcatgataaatacatagtcactaagcttacctgcctttatatccctgctttgagattatagtatggtccttttactagctcagtctttcaccctcctcaaatattgtttcaaatatttaagacttttttccagtccctaattcttctcttcttgcctcttaagccaaaggcacatcttgttaggacatgctggaccttgcatctctgcaattaacacagtttttctactgtgtgaaggtgtcaccttgagtgaagatggttcttgcggacgggaacccagtgtggggctcaactctaaagggatgtggcaatgggtctgaaaatgggttctcaatgaagcatcacagtgtccactatgtttatgaagtagatccaccctgccacagacttctaggtaagagtaggtgatcatgcatcatgattctctactagaacctctttagattccatgtactcaagtcatactatttattttcatactgcatattttaatgcttctcccaactcttttggtaatgctaattgcatgtgatagaattttcgttactgctatttgcaaagagtgagaaattgtattatttctaattgcagaatgttagaacttgtattattttgttaaagcaaaataagatctccaagactcacttttccattgctatgtctattaaccatggtcctggaggtattgaggagggatgaaaagacaatttacaaaactgtggcaaggttaaggaacccagtaagagaagagaaaggattatggggatagtatagtgagtgctcttattcacattggcctaaaagaagtaggagagtgtgtggatctcggggcttttgacattttacatttggggtaaggatgtttgtagggtgctgtgacctttggtagagaaaagcaatcaatatgaaatagtccagcaaggaggcagccaggagacacacaaaccgggacagttggttaccctctctctctctctctcctgccattgtctctcataagacaaactcactctggagtacacaaaaagagatgcagttactataatccattggcatcaacctctgaaggcaggatggatctggagggataaacataacctgcccagaggatgactcatagggtggccttgtgggtgctgaatcccaagtggttaggtctgtgctgtgagctgataaagccccagaattatttatggggaatctatactcctaataatttacagacaacacagatccactttggacttgatcagatggacaaaatcttggggacttgacatcactgcgcacacaggggaggagctgggattgttgtccaggaaaggaaaatataaggagaaaccttggtttgaatttggtgtcagacatatgatgagaggacagccaggaagatctggaacatgaagatttaattacaggccactaactctcagctgacgggcaggtctgtgagttccagaatggagcactgcagcagtaggtggggaggaggctgagagggcgatgaggcagtctgagtgctgagggcagtgcagtcagagaagcaactgcctcatcacagaagcttctgcccttactcagcccccttgctctgcaggatgaggagggagttccatgggtagggaccactggacctaaggaagcctgaaggggaaggaccacaggacagtgacatcacaggatatccttcctatcaggaaaagtgaggctcagaactcagctcttcctgggaggaccaagccctgagcacaggtgcagtgctgcctgctccgctgtgccatgggctccggactcctctgctggacgctgctttgtttcctgggagcaggtgaatcctgtggacaggacagcacccctattctcagcttgcccacccctgtgtcccccacttcaccatggggaggcacaagttcattctccacctattttttcctcaggcccagtggaggctggaatcacccaagctccaagacacctgatcaaaacaagagaccagcaagtgacactgagatgctcccctgcctctgggcataactgtgtgtcctggtacctacgaactccaagtcagcccctctagttattgttacaatattgtaataggttacaaagagcaaaaggaaacttgcctaattgattctcagctcaccacgtccataactattactgagtcaaacacggagctaggggactcagccctgtatctctgtgccagcaacttgatgcaggcctgcagagccaagaacattctgtgtacaaacatccctgccccagtgtggagaacttcagccctaacatatctgtgagaacttgaggactgtagtgggaaagaaaagcagtttcaggaagctggatcctaaaacctggggttttctgccagttaggagtggggataacaaagccaagagggtctgctcaggaggtggtgaaaactaccttcttcgccaaacgctgtacactatagggatagtggaagtgtttgtaatttaatagctggtgccctctttacagggcagcagatttaatttcagggtcaagattcttgataatagtgtggaagggaaaatcatagggtttgctttatataattcagggagaagaaagtgagatttggggaaattctatgaaagagaaaatgatcaaagatagttgaaaacagagatagagcagaaggtaatgaaacatggtgatctgtgcaccatgagctcccttctcctcccacagtttttgatatccagaaaatacaaagaaaggtcttatagcaactgacatcacctggggactggtcctagttggggatatcacaaatagcagcctgcctgatgtgagggccttggggttggttctgacatcttctttctcgacttctggatctagtcttgcctgctcgaggcacagtcaaatacttcccaaaacacaaaggaggtcaggtcagtcttggtcctaaaggtgcaaatgctgtccgttttctcccaagataaaattctgcatccctgggattcctctctgagactcagtgcccagattcaattaccttctgtaattaaacagttctttgaacattttctaaaactcatcagccttggtatcatctgcatttctgctatttccttggcctggaaacttttgttctctccagacacatccagcccctgctcatctgtcaaggatggtctcacatctgccttactctttgcttcttaccctgacattccctggaactggactgtatcaatttatttatttacttttttaagacaagagtctcactctgttgcctgggctggagtgcagtggcatgatcttggctcactgcaacctccatccccccggttcaagctattctcatgcctcagccttgagagtagctggaattacaggcacatgccatcatgcatggctaatttgttttgtattattagtagagacacggtttcaccatgatggccaagctagtctcaagctcctgacctcaagtgatccccacgcctcagcctcccaagtgctgggattacaggcatgagtcactgcgcccagccctggactgtatcactttcttttctttattttcataagaaaagccaagtttataattaatagtatctgaagtttgtaaaatgaaaaagttaatgcatacttatatagaatcctggaatatcattaatcaccatcttcccttcaatgggactcctctttcttaaaatgtaatgaagattcttagagacagtgtcagtttttcatataatttctgcaatattctaagcaattgtgtcttcatagtcagaattgataaccaatgctataaagtatcctaactctaaggctggaatttgcaaatactcttttggagcaaataaaattgtgttgtagtaatattcatccagtctcatgatcctgaaaaaacaaattattcagcataaccacactttccacagccacatttttagagatttgatgagactggaacatcatcaaagatgcttctcagaaatcaacctaaaaaactgaaataaaaattagttaagctcagtaatggaatcttatcatcctttctgagtaaaagatattgtgtgtgcaggaacagaaaaccaaacaccacatgttctcattcataagtgggagttgaacaatgagaacacatggacatagggaggggaacatcacacaccggggcctgtcggggggttgggggaaggggagggagagcattaggacaaatccctaatgcacgcggggcttaaagcctagatgacaggttgatgggtacagcaaaccaccgaggcacatgtatacttatgtaacaaacctgcacgttctgcacatgtatcccagaacttaaagtaaaataaaaaaaaaaaaacccaagatattgtgtgtgtgtgtgtgtgtgtgtgtgtgtgtttgtgtgtgtgtttgtgtgtgttttctgtggagactcagccgcatggaaatagtttctcagggtggcattactaagaggtgttgggtcattggcagagctcctaggtacttctgggtaaagaaaggaaatatcagacccaattgaatctgcctaagttatatacagctcatagggtcgtttatttcaagattttttaaaattcagaaataaatttgtaaaattgaaaaatcctctttatagaatgtgctatctaaaatctgggaataataaatctaaatataggccagacgcggtggtttacacctgtaatcccagcactttgggaggccgaggcgggtggatcacgagatcgagagatcgagaccatcctggccaacatggtgaaactccgtctctactaaaaatacaaaaattagctgggcatggtgacaggcacctgtagtcccagctgctcaggaggctgaggcaggagaatggcttgaacccaggaggtggaggttgcagtgagctgagattgcgccactgcactccagcctgggtgacagagcaaaacagcgtctcaaaaaaaaaaaaaaaaaaaaaaaaaaaagtctaaatacaaagtgtgaaaaggtgtggctctgattattcaaagggagctctggaatgtcgtgtttccagtctggatctgcttgatatcctcacactgtttcaccctgtggcctgtataattctggctcctctcttccatcttaggatactcattgcaatgatgtagcagcagtttattgtgcaatcaagatgtgcccttttgttttcactggccaagggtgaatttgaagttccaccctaagtcaacccttctgggaaagcaatagagagtgtgtgtgtgagagggtgtgggttgcaggggttggtgtaggggcatctctgctcctgacttagacaatgctgagctcatcaggtcagaaggtgtgaatccatgagactggaactttggccacttggaggtgctgtggctccacaaagctgtggggaaccctggggaggggtggagggtgacccaggagaggacggctgaagggaatgcttggctgcgtgctggcatcaggaggcggttggaattcagagtaggtcctgggactgcccagggcaaggtaggcacaccagggacctcagtttgcatcaaggagagaatgtctttgcctctgcatgggcagtggagggtgaagaggctggggcagcaagggctgggagtcagtgccaggaaagtgacaggggttgtcagagaaaaataaggtgggatatgggcatgtggagactgtgttccacctgccccacttttaatttcagggttgtgtaggacaggaatggtgcaggaagcagcagagcctggggtctgacaatgggtagagcaggcaggggtggcctgcagggagagttactgggaaaggccggtttcccaaggaaatgcctgaaacattcctgccccactcaggaaatgaccatgaggtgggtgctgccagacagaggggttcaggccctgcagagctgacaggcctttcccaggcactccctgctgcttctacatgtgatctgctttaatgcccactgatatcaggcagggtaaatatgattttacctgtttatacatatgggggaagcagctgtccctgttctcatgtttagtaactggctatagtcagttcctccaacacctctgcacgccgccctgctctgtacatgtgtcctctcctctggcttcctcatttcagatccccgttagcaggagggaaagatcatgtctcatatgtggtcattaaaacctcttccccgacaagcccaaggaacttccaggtcaagcatctacattcatccttcactgtaggaaagaaaaagaaataaaattttctgcactgtggactttctgtaactgatgtaatataccttgaggaaaatgagcataaatagttgctattcattaattaattaatcttattcttttactcaataaactttttgaggatccttctttgtataaggtattctgtgacataaaattgaaaagaaaaaatattaagtggaaaaaatgtttcttgctttttacagtgttaaggtttgcatttattttttaaattgttttctttattaaaaatagtttactgatttctaaattatacaaatttacttttttctctttttttggctaactagtcccattttagacagccatttaatttaactgtggtaggaatatgtaatatgaaatatatctttttaacagatttttgtatgtacaatacggtattgtaatctacgggcaaaaggttgtacggcaatctctagatcttattcatcctccttaactgaaattgtataccattgacagcaactctccatttactccaatccccagcccttggaaattaccttcacctttgcttccgatacttcgattatttacgttccatcatataagcagaatcatgtggtatttgcctttctgtgcctggcttattcacttagtgtaatgtcctgtgggtttatccacattgtcatatatggctggattttcctctttttaaatgtttaaaatacttctttgtatgcatctaacatgtttaagttctgaagtataaaatgtgtcatatctgactgtttctatgaaacagtctgtcacatgactggcagtcatttgcagaactgcaagcactgagtacactgatgcacattcacagttcaattctgcttcatggagaagacttagagaaaatattaatctaatcattcattatcattttatgatgcacaaaatagaaagccttcattaggaaaatttcaattaattagaaattcaactatacgaaaacatcttaacgtgtaaacgctattctcattttacaggtagaggaattggcccatagtttaaattacttgaccaaattaagtaggaattaggatgcagtactggggttctaaccctggtctatcaaagccctgttttttatagctatatactataatctatttcataacaaatgatgcttatcttcacaaaaattcaaatgttatctcctaggtccctttcagacctgctggctctaataacatcatagacagaaatcagtttaccctggagaggggggggtgggaaacaactatgaatgggtgccatgacatcaagcctgactcccattctagcaccagctcctcaagacgtgaggccagttcttgacagatttggcttagtttgttttctgtttttttgtttttgtttttgttgttgtttttgtttgtttgttttaatctatgaaatgagactgctactgtccatccgcaggctgtgtacaaaattaaatagcataaagtatctagcatgtagcagaaatctagatattaggttggtgcaaaactaattgaggtttttgccgttacttttagttacttttaatggtaagaactgcaatacttttgtaccaacataatattttaatttcctttgataatctcagatagcctctttcaccatgccaatgtgcaaaggcagatgcggacatatgatacctagaaatcttaggttgaggattcagaagtcacagaaatggaaatgtacatttcctctgatgatttatttgatgaaattaactaattaactaaagaatgcagtatggatccctcttgaggtatttaaaaaatcaatgttgttgacatataaattatacaatgtaaacattatacatcttaaatgaacagatcagtgatttttgagcaatatatatgtatatgcccttataatccccacccctcttaaaatgtaaaatatccccacccctattaaaatgtagactatctccagaaagttccctcgaacacctctgcaatgcctatcttggtcccagaaaaccaatgatgtaacttctatcactggagagtagttttgttcacaaatatttttaatgtcaatttaaaacccatactgattaatcctcttgaatacatagctaaataatcaaggcaaggaagagtttctgggaggttttatggttttagaagggattgaaaccatgagagctaccttgatccatggtaggaacgattctatctggagatggatgttgtgccgaaataacctcaaaaggtcttttcagctggtagaagctgattcgacaacatttatttattcattttcattcatttctttgcttctccattcattaactcaaattgtttagtaatgatatcctgataacagttaattatctccaaggaaattattttgagttcccataggacacacatgcagctggttttgtgttcacacactgagaacgctggcgtcaagcaaaccatggtaacagagacttcattgaaagatgatgttacattgggagaagcattctttttgccttaaccccaagtgtttaactcataaatcctgagccttcagctagaattcatcttcctgttctggccctgtcctgggcaccaggatcctgagctgtgtgttcctgtctcttgaaccacaggagtcctgggcacgcacatgaaacccactaatgggcttgttggatcccagctgtgactttcagcaccaggtggcccttagctgtgactttaatttctgtgtccttcactgctaagtgaagccccatagacgctgaatgaccagatcttggtgatgcattgtgctgaaaggaaaccagcacagggggaggtgagcagaatatgaaacaaaatcatgtatttacaaccagcgacatgacttactggcagatcctttgttcaaacactattaagaatttaaaaatcatgacagcagagtgataaagcaagcgtgggatccttctgaatgcagggctctgtacaccgaagatacagtttttgagctccttttcatttattactaaattaatggcaggaatcctgaacgaagggatattccctatgagacatgacacctcaaataaaacgagagcatttttccttatcttgaagtctgctccctctcgccaagtccctcactcatcaggacacctttgtgctcacaagtcttcagcagcgctgggtggccaccattgtccacacagagagggcagtcagcagcatgaggtggttctgcctgctgtggtctcaccccaggaacagaaagcaagactcctggatggagctgaaggtgctcagctggacttgtcaggagtcccatctgtcagtgaattgacaagaaacagagcaaaactactcctgcaatgttgatgagcctgcccctgggatttggaaacctgataacagagaaaaccaatatagacacaggactttaacaggattatggtcaattaagcagattggaaaaggatacttgaaggagtgtttgggacacaggaatcaaaaacaccagggagacaagaggatttttcctaagattctagactacagcaatacatagataactaacaccagaatattaatgaggaattatatcattgcaggaataaaatttatattgaattacaaactgtttgcacaaaagtcaagaaaaacttgaaagccttatatcaagaagcattcttcccatccaaacttcagtggtgcatttattttggatttgaccctctggggaaggggcatggcctctctcgacaagaaggttctggggaccaggcagagagaatgaggtctcaggatgacttccttgacagccctgttcgcctttcatcaacacacagacccagaagacctctctgtcttgtagcatctgccatgagaatcaggctcctgtgctgtgtggccttttctctcctgtgggcaggtaagtcctgggcagggcccatgtgtagatttcaagacccagagccttcccattgaggctgcagcattggctttgttctccttctctgtaggtccagtgattgctgggatcacccaggcaccaacatctcagatcctggcagcaggacggcgcatgacactgagatgtacccaggatatgagacataatgccatgtactggtatagacaagatctaggactggggctaaggctcatccattattcaaatactgcaggtaccactggcaaaggagaagtccctgatggttatagtgtctccagagcaaacacagatgatttccccctcacgttggcgtctgctgtaccctctcagacatctgtgtacttctgtgccagcagtgactccacagtgctgcacagccatctcctctctgtacataaatgcaggggaggctctgccctcctccccgaccccagactcaaccatgtccttggcagagttctcagcactgggaatcttggaagcccaatgggtgccgggcagtgtgagcctcagtctgtgccaggtgcctctgcaggcagtcccagccaggcctggactggtcccagagcctcagaggtctcttttgttgctctctggtctttcttccaagctatctttttgggatgggaccagggctttcccagctcttacttttctactcatcatcctgagtctgaggtccacaggatggaacaggatttgtatttcaaatctgtctagactcctgtttctctctgggggccacgttgcttcctctctccagggtttcctccagtacccactctcatgtggtctcacctgtggcccgcctttcccatctgagcagtcacccccgaaggccttgctgggcctctgcacaccacctcccctcgcctttctactgcagccatgaggctgcctcttctgtgcctccttcctttccaacacagagacctcaaaggccatttcctccgccctgggctagtgccttcctttctgcagtggtcagcttctacctgcacttctgatctcagcatgatcagcctctcctgctggaagcactccctcaactctcagctgaggtcaaatttcagtttccctctcataagctcacagaatcatgtgcctcttagtaaagttcagcaccgttgcaatttttccaacacttgttttattccttttgtgctccacttaattttaaactcatgaagctgaaggctgagcttgttacattcaccaccagcagtgcctggcaggcagggagtcctcattcatttcacagagaatggatgagtgagtgacaggtgagtgagtgatgagtgggtgaatgaaccagtaacaggaacacactagattcattgtaccctggcagaggtctagagttaactttgcctgagatgctctgttatgagctcatcaaggagcactcacttgttgaacaagcataggaccatgcatggtgcaagccagtttgtcagtctgggaatttccaatttaaaatatgatgtgttcttcaagctgaatgagggtaaactttctgtatataattataatatctaagccatttcttaaagttttgggttaggaacaaaaaacccctgaagagggaacatttgtagatttaggatttttaaaatatatttatattattttcccttggaagaacaggatgggaacagccttatagttgctaatttgtggagaaggcatcatataaaagtaagagaaaatcagaattgtgttctagagggtaaattgtggctgtcctgagagcatgttccccaggaacctaaaccgtgagcatgttcaggaacccagagtgcaacagacaattcttggccccatgaatttggtggtaagactggagacagttggaaaaaccatggagtcttgaagttcttcactctcaatgcaggcctctcttgaacaccacagactaatgtcagataaatatgcttccactattaagactattaaaacaagaaccaatgaagagaagtgagcagaaacaataagcaattgaagtgtttgaagacaagaaatttttaccattaaaaggtatgaaagtttgtagaactatgtttaaaggaaattgaaatgtgaacaagaaaaaaagactgacagaaaccatcaagataacattaaaaaataatcaaattcaatacagaaatgattaagattatcactgaaaacaaaatggaaatgaagaaagatgaaatgcttctaagagattattagtgatgtcaaggacagagctgaagaagttacatagaatgcagcaccgaaaattaaatatgtaactttagaaagagcttaagggtggtttccagcatagtagaatatataatttttaattatatatatttatttatataaagttatttatatttatatatttaattatatatttattatataaaaatatataatataataatatagaatatagaatatatattctataatatagaatatagaatatatattatataatatagaatatagaatatatattatataatatagaatatagaatatattatatagaatatataaatatatatatttcccatttttcttatagataattgaagtttcagaaaaagaaagtagagggaataagtgattgtgatgagacattagctgagaattttccagaggtgtttcaggacctaaattctcaatttcaagaattcaaatgaatatgaaataagataaatgtttatattataatgagattgtggaacataagtgacaaatagatgattctaaaagctgtcaaaaagaaaagataaatctctcctagtggaatagactgaaaaaatcaatgaaagaaagaggatcagaaataaccatttagtcggaattataatccccattcattaaacactgagatggaggaaaatatatttacaagtggaaaaattaaaaaaaaagactatgagttttccaataaggtatcttttctgaattatagtcaacaaaggtgggaagtggtcccagaagaaaggcatgaggtgcagcttgtgagggaacccatgtgttgggacagccccgttgggcacgtgtgactgggggatggaggaggctggggcatcaatggggatggcataggggaccctgacttgcagaaaagacaatgagctcatcccttggtgccttgtgttgggggcgctgttggcacatcctagagaacatgcccagcagacagaggagcgcctgtgtggtgaggagataaactcagaaatgcagcatgaggcctgtagctccagacagctctagagcacaaagtgaagaccgatgcattgatgttgtttaaaaggagctaataaatatctaaagcagtcatccaagtgtgttctaatataaatcctgtgttcctgaggttgtggggattgagagaggaagtgatgtcactgtgggtactgttctgtgtcaggacaaggacgtccctcctcctctgctcctgctcacagtgaccctgatctggtaaagctcccatcctgccctgactctgtcatgggcaccaggctcctctgctgggcagccctgtgcctcctgggggcaggtgagtcctcagacaccaaccagtctcattctgtgtgtctgtatgtgtgtgtgtgtgtgtgatgagtacaactgttttcctcatcctgttctcaacttgtgtctccgcagatcacacaggtgctggagtctcccagacccccagtaacaaggtcacagagaagggaaaatatgtagagctcaggtgtgatccaatttcaggtcatactgccctttactggtaccgacaaagcctggggcagggcccagagtttctaatttacttccaaggcacgggtgcggcagatgactcagggctgcccaacgatcggttctttgcagtcaggcctgagggatccgtctctactctgaagatccagcgcacagagcggggggactcagccgtgtatctctgtgccagcagcttaaccacagcatgacacaatcgcctccttcctgctcataaacctcctcctctctctccttgcttccttatgatactattttgcaccaggggatcctcatctcacaccactccactgcctcttccagaatcattgcttgcatgtccgctgctcagatcagcagatgtgcgttgtatatgttaatcattttctgtggaaggctcgttgctggtcttcattatccatccttattttccacattggatactgctcccttcaagattacttgttgcctacaagggatcctactttttacattcaaattttactttttattaatacgtatttgatgccatcttgaaggcaatctcattatcatcctaatcttttgctaatctttatgtttacggtaacattgattgttattttgggggacatgtatttcatctttggtaatgaaatgaaataactatgcacttcaattcctgtatgttctgcctacttaagagtaaatccaattttcttccattcctcccattctatcccactccctttatatgatagttttaagggagaaaatattaattagactctaactgcagctatgtgataagagttatttagaatgagggtgggatattaagctttgagtaaagcaatagtcagggttagaactagtgttggaatcagggtttagggaagttgctcataaaacctgcaggatgacacttctagaatagtctctcactcactctgcagacacttcccagcatcccttgggccattgcaaaagcaatgatgaaacttcacgtgttggccacaagatggcactgtggtccactgggatctaagggactctggggagagcctgggagagcagcctaggaagggaagggttaagaaaaattagggctggcatccaatattatgcagatgttgcagcagttttcagtcattgctaggctacctacagctatgcaagatgcaggaaatacctctaatctttaatgagatccacagttgaagaattttggcctggcagccttggtgtcaagcgcaggtgcaagcagaggagcaactgcctcaaaggaacgtgggaaagctaggggcgggctgtgccctaagctcagtatgtctctgctgcaccccatcttccctgcagacctcgccgggcaacagccttcatgagaggaggtggatcctgcctgagaccagtcagaaggccctggaccagctggactccgtaggcatggggggtgacaccacaggcccaccagactattccctagggagcagcctccaagccccagctcacagtcctgaggatcactgcacttagttgggccagcccctcctcactctgaccctaccatgaaccccaaactcttctgtgtgaccctttgtctcctgggagcagataagttctggaaacagctgcaaaaccctgtaatgggtttgcaatgtctgggctacaagccttttttgtcctttcctctgcagagtccccttatttcttaagtcttgtcttcactttctgtctgcctctccagcaggctctattgatgctgggatcacccagatgccaagatatcacattgtacagaagaaagagatgatcctggaatgtgctcaggttaggaacagtgttctgatatcgacaggacccaagacgggggctgaagcttatccactattcaggcagtggtcacagcaggaccaaagttgatgtcacagaggggtactgtgtttcttgaaacaagcttgagcatttccccaatcctggcatccaccagcaccagccagacctatctgtaccactgtggcagcacatccgcagccctgcacagccagctgccctctgcacaaaaagggcagtcacaggctggaggtgggcactccttatggaagcccgtgtctcaaccagaagaaaaagctgccctttctgaagctcttcccagacttcccagcaatgagatctcattctatgtgtgctcctgcagcataaaacttagagtgagctgggtctgtcactgtagtgcggatgtgtaaatgcaaacaacgtaatgttattttgctcaatttggaatattctggtaattgtgcaaaggaatggtagcttctaacaagaaattcatatttcactttcttttcaggagagaagaaaaaagcagaaagcagctgggaagctttagcctgcttgagtgatctgggattctcaagtagcatacataacatcaccttggctttggttcctttagataccaagcatgtgttctgtggaggacaagaaaatccatttttttttgttataaagttataaacacacaagagaacaatccagttagggagaatgttaataaatacaacaaactctgccattagacctgaagataatcagctagtagaattatcaaagagattgtaagactcttactgagtacctgtttgaggtcctctgaggatagatgaaggaaggaacttaattcttaccatcactgtggcttggattagaatccatgagttccttaacttgtttttcttgtaaaatattataaaataatatagaacacacattttattttcctgtagcctgtagtcctctttagcacctaaagggagaagcgcatatcccggtgcaaaagggagctggttgcttgcttggcaaaaaaatgaattcaccaattggccaatctgctgaaagtcaaaatgaaaggctaatatatgagactgatgacagttcatggttcttggtataacttcaacagcgagtgaacatttttttctttgtctatagctttctttcagccatcgatcctcagttgtgtcttagcctcttatcagtccagctcactttgatactaaatttgattgttgtgtatctcagcaagaagcacgtctcacattctctgtattttatgtggtcatgagtgtgttcctgtcttattcttattttatgtggtgcatttttaaataggactgtacagaatacaagcatctatttgtatatgactctcatcttttatggggagaggtcagagtaggtgagcgtgcactttgattctctgctggaatctctttggattctatgtcccctgtcacatggtttattttcatatgcatatttctcatggttctcctgactcttttagcaatgctcattgcaggatattagaaattgtattacttctaatggcagaatgttagaaattgtgttgactcttaaggcaaaataaaatacccggactcacctttccattgctgtgtctattagtcgtggtcctggagatatcaaggagggacaaaaggagtatttgcaaaggtgtggcagggttaagggaacccagtaagagaagtagaagtagcctaagaacagcagaatctgtggctcttattcacattggcctgaaataagtaggagaggatgtggatcccaaagcatcaggtactgtagctctaaggcaaggctgcctataaggtgctgtggactttggtagggaaaagtaacctatataaaataatgaagcaagaggagagccagggcatagatgaatcagaacaagtggtgcccctacctccctctactctcctgccattgtctcccattagccaaactcactctggagttagagaagaagagagccagttaacataatacactgaggtcagcctctgaaggcagggtggatctggagaaattaacgtaaattatccagatcactacgcataagatggccttgagggtgctgaatcccaaactgtctggctaggtctgtgctgtgagctgataaagccctagtgttatttctggggaatctgtactcttaataatttacagacaaccaaggtctgctttggatctgatcagatagactaaatcttggggactttgcaccactggccactcaagggaggggctggaaatattttctgaggacaaaaaaatagaattagaaaatttggttgaatctagcgtcagagagatgacattaggacagccagggagagctggaacaagaaggtttaatcacaggctcctcaccctctgctgatgggcaggtgtgtgagctccagcatggagcacgacagcactaggtgggaggagggtgagagggtgatggggcagcctgggagctggagcagtgtaggcagaggagcaactgtctcatcacagaagcttctgccctcacccaacccttctgctggacagggagggagttcaggttgtggggagtactggacctcaggaagcatttatagggaggacacaggacagtgacatcacaggatatcccacccatcaggaaaatcaaggcccagaactcacttggcccttccccaggaggaccaagccctgaatcagatgcagtgctgcctgccccactgtgccatgggccccgggctcctctgctgggaactgctttatctcctgggagcagatgagtcctgtgcacagaacagcagccccattctcagatttcccacccctgtgtcctccactttacactggggaggacctccaggctgtctgctgtgctcatcctccatctgcttttcccacaggcccagtggaggctggagtcacccaaagtcccacacacctgatcaaaacgagaggacagcaagtgactctgagatgctctcctatctctgggcacagcagtgtgtcctggtaccaacaggccccgggtcaggggccccagtttatctttgaatatgctaatgagttaaggagatcagaaggaaacttccctaatcgattctcagggcgccagttccatgactgttgctctgagatgaatgtgagtgccttggagctgggggactcggccctgtatctctgtgccagaagcttggcacagccctgcagagtcactggaactctgtgcactaatctctctgcttccgtgtacagcagtctcagaccagacagctgtgagaacctggggccttcagggggaaagataaacaatttcaggactctgaacaaggctggcggaaacaaggccaggaggatatgctcagaggatggtgctgcttcaggaggttcacggcaaaattactttctttgtcggatgctgtacactatagtgatagagtagctggcactctcctttttagaaaaagaaattcattttggtgtcaggattgttcgacagatgtgtagtatagaaggtaaaatctcaagggtttgctttatataattaagggagaagaaattgagatttggtttggagaaacttgaggagagagaacatgattaaagattattaaataaatagaagtagagctaccagatgataaaaaattgtgttctctgcaacataacctgtcaaagttttcaattgctagaaaatacgcagcaaggccttgtagcaactggcatcaccccgaggccactctatgatggtcatcaccacgtagccagttgccctgtgggagggccctggagctggttccaatgtcttccttctggacttatatctcaattctcaaaacagaggaattcatttcactgctgatggtaaacagataaaggctctcccatttccccaaagatacattctgcttcccttgtatctctttctgacacttaccgcccagatccattaccttctgtgatcaaacacctcttcgaatatttcctaaaactctgcagcctttacattctctgcatttgtgctcagtatttccatggcctggaaggaccttctgtctcccaagaaacagccagaccctgcttatcggtcaaggatgggctcacacctgcttcctctttgcttcttaccatgacattccccagcattgtactataccaccatctttattattttcataggaaaagccaagtattaattaaatatataatgaatattatttgatgttgtgaaatctatgttaattcctgcttatatagagttctggaatattattacttttattcatgtgagggatattattaaccactaactatttcctggttagagatcaaagtcacttctgtgtaatgatagcaaatgtgagaaccagctgaatctgtttgaattacagctggcagtattattcatttcaaaatttttataatttagaagtaaatttttaaaatctagaaatccttttgtgaaatgcactgtctaaaatttagtaataatgaacctaaatacaaaatatgaaaacatatgggtgtaattaactgggattagctgtggaatatagggtttccaggctgggtttccttgatagcatcacactgtttaattgtatggcctttataattctggctggtctctaccatcttaacatattatttgcaattatgtaacaattgtttattttgtaatcaaaatgttggttcatgtgtcctttgactccattggctaagggtagatttgaaaatcaaccctaaattgactcttctgggaaagcatggacggggtgtgtaagagggtgggagtggcaggagtgggggcatctctctttctgatttggacaatttgagcatatcacgtcagagggtatgaatccatgagactgtagactgttggccacttggaggcgctgtggctccacagtgctgcagagaactcagcggaggggtgggagagtggccaagagaggaggactgaaggggatgccctggctgcctgctggcatcagtagagtggatggaattccctgagtggggcctggccatgtagagttaagcacagactatcattgccttgaaagagttggggtgccagaggcctcagtttgcatcaaggagggagtgtctctgctgctgcacgggcagtggagggtgaaggggctggggtggcaagggctggggaatcagtgtcagggcagggacagggcgggcagaggaaagtaaggtgtgatgtgggtatgttggtactgtgttcagtcctcctcacctttagcttctggcctgtgcaagacaggaatagtacatggagtagcagaacctgaggcctgccaaagagtacagtgggctggagtggcctgcaggggaaagtatgtcagtgtggtgacatcacaggtcaatgctcctatcaggaagaagggagcttaggaacttcagaatgcttactacagagacaccagccccaagctaggagatcctgccatgggcttcaggctcctctgctgtgtggccttttgtctcctgggagcaggtgagtcctgggcacaacttgaaagtctccgatcttcatttcttgtccctgaaatgcatgtgggccaacgatggcttcagcaggaggctttcttctgtgccttatggttaacttttgtcttctgacacacaggcccagtggattctggagtcacacaaaccccaaagcacctgatcacagcaactggacagcgagtgacgctgagatgctcccctaggtctggagacctctctgtgtactggtaccaacagagcctggaccagggcctccagttcctcattcagtattataatggagaagagagagcaaaaggaaacattcttgaacgattctccgcacaacagttccctgacttgcactctgaactaaacctgagctctctggagctgggggactcagctttgtatttctgtgccagcagcgtagcacagccctgcatgagcatcagccttctgtgcaataacattcctgccccactcaggaagtgacggtgaggggagggctgccagccagaggggctcaggccctggagagtggacaggcctttcccaggcactctctggtgcttctgtatgtgatctggtttactgctcactgaagctgtgtaagcgaaatattattttacctgtttatatatctgagggacagcagatgtcctggggctcatatttagtagctagctgaagtctattgtttcaacacctctgcactgtccctcctcactccggagatctgtccttttacctggtgtcccctttttgtgtccccaagagcaggatgctaaggtcatatatgaaactgtgatcatgataacttgttccctgacaagtccaatggacacatgatttccaggcaaaacatatccatctattctttattgtgatttaaaaaaaaaagaaagaaaagaaaggtgcagttttctgctctgtagccctcctatgggcaaggccaggtcatctcttttatggagactgtatgaggagggagctttcctaggttcacagcaaatagcaggaaacgttttttatggggcgtgtagtcttcctgtggcggatgcaatctgccatcagtgaaaggacatgaaaaattgttattcattagttaatattttttattcttttttttttttgagacagagtttcactcttgttgcccaggctggagtgcagtggtgctatcttggctcactgcaacctccacctcttgggttcaagagattctcctgccttagcctcccaggtggcctccaccacacctggccagttttgtgtttttagtagaggtggggtttctctttggtggccaggctggtctcaaactcccaatctcaggtgatcacctgccttggcttcccaacgtgctgggattatagagccattgcactaggccaattttttattctttatcaataaatcttttggggcatcctactttgtacaagggattatatcacatgaaatatacaatgaaaaaagataattggaaaaaagggaaattttttaaaaatgaagaaaagggtgtttcttgcatttgagggtatcaaagtctgtaatttttggtatattctaattagtttactcagtttctgatttatacgaatttcctctttcttctctttctctctttggctacctacacacttttgccagattttttaaagtttttagtaacaatatttaacatgagatctaccctttttatagacttataagcacacaatacagttttatactctgtagtcataacgttgtacagcagatctctagatcttattcatcttgcatgattgaaattttatacccattggcagcaactccccatttaccccattccccagaccctgaccgctaccattctagtctttgcttccatgagttggactattttagataactcatgtaaatgacattatgcagatttttgtctttttgtgattggcttatctcatttagcctaatgtcctaccaagtatagtggtgacagttttacttctatcttccacagttcactcgaatagctccttgaccaactgtaacccagaatcataaagataaaggcattcttagaaatataacttcttgtcctggctaagttaacttaacacaacccggtacgggatggattctcccaggttgaggcatctggtcacatacgagtttcaacctatcatggtctccaggatccatttttggcggcaccactgctgcccaggtgactgtggacacaacttagatgtctctgtcctagattttccaggccccagctactggcttttcttttaacctgtgccggcagtctccctccactcagacgcagggatctgcctcctgctcccatctccttcctgaacttccgccctgctggagttgcatggatatcagggcccctggtcaatgtgcggcagcccacggaggcactgggagggaagctcacctctagctgccttctggggcccagttctgttataccccaagcaagtgctctgttctccctttgggctccacagtatgagaaatgcacttcatggattcatagctgacccctagctcagtaatctgatgacaaactttgagtttcactcaaagtgaaactctcagagctgagggactagctctgcatttctctgatgagggtaagaatacagtgctgtagagatgccttcttccctgtgtagacctggcactaaacaggaaaaaccagacagggtaaaagtgcccaaatatgtctgagaagactgaaagaaaatttcctaagaaaatccttctcctgacttcattcagttcctagtaagacacacctcaccctctgacccccatatcagctggtccccccaggatatcacacgtcctagtatctaaccccacagcaactaattcagatactggcctctttccaacctccagaaacggtcttgccaatagagttttgttggccgggcgtggtggctcacgcctgtaatcccagcactttgggagcccgaggtctggtctggtcacctgaggtcaggagttccagaccagcctggccaacatattgtgaaactccgttccttccaaaaaaaaaaaattacaaaaattagctggtcatggtggcacatacctgtgggaagctgaggcaggagaattgcttaaacccaggaggcagaggttgctgtgagctgagatctcatcactgcacactccagcctgggcaacagagcaagactccatctcttaaaaaaaaaaaaaaaagagttttgtcctctgaccaccaggtctatctagatatctaggcagatttaatttacgattaatttgacctcttaatcccattaaagggagaatgaagagcgtatggtttcaatgtaaagtatattcattttattttgaatgagttggaactaagtagtaaactgaggatatcactccattatagtcttaaaacaacccatggtaaaacaaatctctttactaggactttctttttcacattttagttcctagttacccagagtccagaatagttaagagttgaagagtcatgactgagatggtctgtgggggtttataaatgagcattcacttgttgaacaagcctagggccactctctatggaagcagtttgtcagctggtttgggaatttttaatttaaaatatggtacgttctttatcttgtataagtataaagtctacaaatataatttgcatatataggctagtgcctgaagatttgggtaggacaaaaaggaaagaagagataatatttgcagatttaggaagtttcattatataaaacttcaagggctcaggggctctaatttgtgaagatagtataatgaagaagaattagaaaatcagaactctcttctggagcctacactggggttgtcctgagaaaagattatgatatgaggaacataatccatggtgtgcttagcagcccagagtgtagcagacagttcttgactcatgcagttgggggggtgagactggagacacttgtggaaggtactggctgttgaggctgtgctatagcctctccaaaaccccatagatgaatgtcagacaaatatactgccactatgaagaatattaaaagttagcagaattcataaacactcgcaataggcagcctgaaggtttaaattttagcatcatgacatatgacagtttgaagagctgtagttaaatgcacacaaaagagaattgaaacctgaacaagaaaaaagagactctcagaaatcattagataacttttttaaaagcattgaatgggatgtctagaaatgatccctaaaatgactgaaagaaagcagataaattgaagagcagattaaatgctcattgaagagattattattgacttcaaagacaaatcttaagaagttacccaaaacaacacaaaaaattaaatgtataatatgaaacagagaggaagcaacagagaagaaacaatggaggtttcagttatattcgaatatatgtaacatttcataagaattttccatttattcttatgtcattgaagtgtcagagaaagaaaataaggagaatgatatgaggtgatattgtgtgtgatgctagctgagaaatttccagagacatctaaagacctaaaacgtgagtttcaagaattcagataaatcccaggttaaatagttacctcagtgttaaaatagaagaatatgaatgatgaagacacaatttttcaagcagtccaagaaagacaaatatctcgcaaaggaatagactgagaccgacaggaacagtgaagaaagggagttaaaaatatctataaatgcagattatagtcctcattcatcaaagagacaaggagacctcggcagttcatattctgaccccttgggctggtgacctgaaatatatttggctgagtgttctcatttgtaaaccgaattcaatttgcagagatttttttttttttttttggaaatagagtctcgctctgtcgccaggctggaattcagtggcgcgatctcagctcactgcaacctccgcctcctgggttcaagcaattctcctgccttagcctcccgagtagctgggactaaaggcacacacaaccaagcccagctaatgtttgtatttttagtagagatggggtttcaccatgttggccagtctggcagagatttgagagaggtaactttaaaaattagagtcatataaagtgtaggttcaagaaatcttaggtccctataaattctctgacaaatctccaatctagcacagttatttactctctgaaattctggtaacaaagacaagcacagattacttttgcctgattcaatcatgtttcagacacaaagtcatctaaaatgcaaatatagtagtctgatagttcattatgtaaaattaacataaagagttgccgtttaaggaaatatgcaaatgttacctcttatgaacttcctgcttgataactgagtctgatgtgcatgaaggtgtggtgctcctagaaagatatggcttcagtgcaattgtccatcacacaagagagctgatagaagaaggcacagctttattggaaagaagaccacagaggagcctctagtggcttccatgacatcctctccgcccacctctgatttcagccttgctgctgtggacggtgccagttcccattcacctcttgctgacagtgcccttctgcagtgcctgcttggaatgttgctgcttcctgctctggggtcttctctggtatctgaatccacttgggctgtattcaaagacagccagaggtcctgatgctcctggtggaacaggacagggggacaaaagctccaacctgcccattcatgcagatactccagagagcaccctatgctcttggaggtcctgatggattccgtctcctgttgccccagcacaaatacaatattgcacctttatcctggtttctcccttccctattttgttttccttgctctcttacttcttcctggaatcatttcccaaataagctacatgcacccaagtctccccatcacagactttgtcttcagagacagactaaactgtggcagtgatggaatgaagcgaccatcaaaagaccctaccttttgaaggagacaactgtttatcttttattcatatggctacccattcatttaaaaagtcttatgatgatgtatataaactaatcttttccaaatccatttggattcatctggaattcccagcgttctcaggatggctctctgctcccttaaaacttcaaacctattttgaactgaataaacttggattctgtttacagaagtagaatctgcctggactcagataatcattcattcctttcttcattcaataaatatttaatgaattataggtgaagattagattcaagttttgtggcgcacaaagctgatacattttaggtagctctttgcaaaagagagtgcaaaatagcaaagagttgaaaagaccctgtgcaagtgagaaggcctgaggttattcttcatcggcttcatggcaaatacacaggtactgtccaggtacttgggaaacaccagtgcaaaaaacagacaaagcttcaagttgaggtagacaattttaacacataattgttataatttattatacttaataataaattaatttaaaagtagaaggatatattcctggtagatgcttatctccccggagaagttagagtgtcattgagaatatcaacattcttggtaaatcatacctgatttagggaatgatccttggagctctggaattctacatgccttaccttgcaaaatgaaggtcctgatctgaaaagttttttttttttttttttttttttttatgccctggcccaaccatgaggattggcttctttgctgtgtggctcttggtctcccaggatcaggtgagttctgggcatagatgagaaagtccttcctgggcttgtcgggccccaaccacggcctcctatgggggtgctcatgggcctcctccctgtctccacttctgattctgtgtcctctctcactggagcatgattgtgggaattacccatccaggttgcatcaagatgtgcaatagatagcctattgtatctgaaataactattgcagtgttatggactacatgtgagttttgcaccatagcacgtttacaaatccatcaaccttctcccatttggtgaatataagatctgctggatgggaatagaggattttcctgtgaccctagagactccaggtaggtgtagttcttggtgaacatttcatccatattcctaatgagcctcctcttttcttcacaggaagtacagtcactcaggggacttagatggggcagtgtttgtggcttcacctgaagcaaagggagaaaacacccccatgagaatacacagcagcctgagcttggatggtgacattcccatcaggtgtaatgaggtgctacagcatgtaacaagtcttcaagcggtcatgaccttgaacctggaacttggaacttggagacatttctggatgtcatttaaccgagggtatccctgtatgctggcatacaagtgtccagaggttaaacgaagaggaaaataattcaacttggagttgaattttgtgcaggaagtcataaaagtcaccaggactgctatgacaatgttctttagcctacagaaatattcataaaagtgaaaatagtattcaaataaagaatttctcatgatggaaataaaatatacatagaagaacaaattcccctattaaaatcagggaaagagcttaggagtttattagatttctttcaaaacagacctaaaaattattcaactctgttataaataatttgttcctgcggggaagagaaggggcatggcaggttagctccgcagttcaagcattcagcaggaacagtgacatcatcaagtcactgagagcccaacttcagtctgcccacagcagggctgggagacacaagatcctgccctggagctgaaatgggcacgaggctcttcttctatgtggccctttgtctgctgtgggcaggtgagggctggtcacaggagggcctccttccctggaattcccaaggcctcagtgcaggcttttctgttgggatgacagcatcagcatctgttgttctctattacaggacacagggatgctgaaatcacccagagcccaagacacaagatcacagagacaggaaggcaggtgaccttggcgtgtcaccagacttggaaccacaacaatatgttctggtatcgacaagacctgggacatgggctgaggctgatccattactcatatggtgttcaagacactaacaaaggagaagtctcagatggctacagtgtctctagatcaaacacagaggacctccccctcactctggagtctgctgcctcctcccagacatctgtatatttctgcgccagcagtgagtccacagtgctgcacagctgcctcctctctgcacataaagggcagttagaatgactgaggttgcctgtgctcccaagtcccagccttcacaggagtcggagagccctggctagcctgggggccatagagcaggggccatataaaccttgatgttgaggtccattcctaccccagtctcagaccaactggaggtcaccccaacacccttagcttctgcagttccctctttccttttgtaaaatggaaaaggcatctttagtcgagattcctaatttcgttgaaaatttgaaacccaccatattcttctctaccctaagggctgggtgacttttccacataccctttcccctaccctctactgcctttcaactcccaatcataaatctttgcccatgtggtctctgctcctgggggccctttattctaagggcaatagacccacgaggtcctatatcattagccatttacgtacctcttcatcatcattttgcaccatgttttccctggctctctgctccagccacactcccttacatgcagttatttcttcatatgtgtctgttgttttccaccctggggattgtttatataaattctttcttctgcactgagcatacataccacccacttagtcctacatctctacttcatttcttaaattaaagtgtatttcaggcacacttgctcttaattgtaaaaagcaaaaaagaaagtttactagaaaaatttaagaaaagcattttatgcattcagttgagggatgacatttttagaggagacaaaaagccacaagccaaaagaacaacattcataacgctagttgcattaaattgtttcaagccaaaacacaccataaaaaataaagttaagctacagcctgggaaaggcatgaggaatgcatacaaatgatgaaaaatcagtgtgacagagaacattcagtgtaacagagaacattcagaacatcactgaatacctgtagctcctccatggtttctggtctcccttgcagttggaggggtgggaacatgtcaccaggttctgaatagtgggataaaatgatgtcagctcatttcaagcctggcccttaaaaatattctgtggcaccatgttgagggtctctaaatgtactcccatgtttagagtgttggtatatggcatagagttgtactcatggctaagatttattaaagtgtcatagtaaatactctgcagcagaacatgtggagaaaacacacaggcagaatctggaggaattcacaggcaggcttccttatgctctcttcctctcaggaggggtcacacagagctctctctcctcccagcagcaaaaatgcattaacacacgtgcagtgtatctgccaagggagcccattacagacttagcacccaagaggttttagtagaagctggtcacacaggcacctactttttagcatgaaccaaaagtctagatcccaaaagaaaatctgatgttcagcataatattatttgcaacaccagcctaggaacgatgagccacccctgtcagtcaggagaaactttgcatcagttcagggcaccgttcaccagccaagctcccagatgtctgccagagtccaatcttgcaagcaggactttctaagcaccgcagtctccagcctcctgtcaactcttgtgcacagacactcttcaactctcttttgccatgtcctgaactcgggagctacacggtacagattgcctaatgataatatggaagcagcctggctcactgagtcagaatttggtggacaatcacagaagaaagctgctcatgccacactgggctttgtggtcatgggaagtaagacttcatagagctatgccagtgagattttaggatttgttttgtttgttttgttttctgtagcacagctgttcttgtctaagagaattagtatctagaatgagtaaaatattcttattacttagtattaagaagacagctcaataaaaatagcaatactgaggctgagtaggcaattcacacaagagtgaacataagttaccactaaacatgagaataacttcgcaaccttacttacaatcagaatattgcaacctgaaacagtaagttatgatttcaaaattactagattggatacttttccaaggaatgacagtcctacatttgagtagacatatgggctggtgaaaattgtttgtatatttattacaaaagataattacaactacatcagaaaacccactgtgggatatattgtgacaaaccacatttctggaaaatttatcaacgtatttaaatcacttgggttcctttcattgtctttaagttcaataatggagaatgcaactgtcagtgtttttcctattttgaaggtagtctttccatcttttaaaaagtatgataaaatgcacgtaacatataatttcatcactttattttttaaatgtacaattcaatgacattaagtacattcaccttgttgtggaattatcagcattatccatttccaaaattattttcatcaccccaaacagaaaccctgtacccattaagaaataacttcacattctccctcctctggcaaactctaatctattttgtatatgaacgaatttgcctattttagataatgaatttacatgaaaccaggcactatttttccttttgtttctggcttctttcacttagcataacgctttccaggtgtatccacattgtagcatttattagaacttcattctttttcattctcaataatattccattgtgtgtatataacacatttgtttattcattcattagtcaattgacatttgggtggtttccaccttgtagatattgagaacaatggtgcagtcaagactggcctggaaatatctgtttgattccttgttttcaattcttttgggtctatacctaggagtggaacttctgggtcctttggtaattctgtttctcgttttgagtaactaccaaaatatttctttgttgcagctgcacgattttggatttccaccagcagtgtccagtttcttcacaacatttccagaacttgttatttccttttctttttcttttttcttttcaaaaatatgatgatgatgattactgtttttatagccatcctagtaagtgtgaatgatatctcattgcggttttgatttgcatttccctaatgactaaagatgttaagtgtcttttcttgtgcctatgggcaatttgcataccttctttgaaggtaatatttattttatttgattgtgtttttagagtcgctattgactttagatttaagctggtgtacctgtgatgatactaaaggaaattgagattgagattaaacttctcttgggcgatttgttgttggctaagtgtttttaggtgcagtacttctgagacattttgggatactgtagagagagaaataagtaatttattgatatttctgggaattagattttttttacaaagagaagagagatataaataagaaacgggaagatgaggaagaaatctgtggtgctgacttgaattggagttattaatgcaaacttaaggttttaaagattatatatttcctaactttatccagagaagggtctaaaaaacaatacaaagtaaataaacgaatggctatatttgcttttttttgtgctccccagtaacaataggtacattattttattccaaatgttattccttataaaaggctgcttccatatcaagggaaggaaaagtgttagaacatcttttggtagaaatcaagaaaaaggtcagaaccaagaagacatgtccaaaatccacagaagcaatttcaaggggctccattagccaaatccgggtcaatgcaagctttaaagaagaataatgaggatactgaattgtaacaagttataaaaatctataaggctataatgacaatcaaaagagatagataagaatctcttcattacggaagaatgctagttgatatatctaatgagaaaatcaatgcaaccatccacataattatagacaaattccattagtagatgcctaaactaacagtttttgtttccttcaatactttgagttatactgttctactctctcctggcctgttgggtttctgctgagaaatctgctgaaggccatactggggctcctttaaatgtgatatgtttctcactgcatgctgcttttagtattctttctttgtctttgatttttggtaatttgattatattgtgtcttggtgaactcctttttgggttgaatttgattggcagcctccaagcttcctgcacctggatgttgctgtctttcctcagatttgggaaattttcaaccattatttccttatatatgtttttggggcctaacagcatatgtaccttgtttcaaagcatcaatacacagattattacttaattacaaagggtaaagggcacattcacaatggagagatcttggatcagtcatctcaaattaagcattgccaaaatgcataaaaatgacattccatattcttgtgattgaccagatgcaatgggaaatagacatcatctatggtgtatattttccaagtaattaacctctaataatatgaaaatttttatcgtgagctgttttacaagtaagctgaccaggacacttcaaaaatctatggtcatgaaaaacagaaaatataataagtgggtggaggagatgtatcattgaaaagtaactaaagagatccgacaacttcctgaaatacatgatctttgatattgtcccagaggaaaaagtaaatcaaaaccaagggacatggttttggtggggacaaaccacggccaaaccgcaggcggggctctggcaagacagtaggaatagatggagttgggaggaactccccccagtgccgcgcaaacactgtccaatattagccctgattctactgaggacagtgtagacatggccccagtatttctgacccatgaatggagggcctgagcctggtaactctgaaccattcattgaccagcaggcggcactagggtttgctggggttggcttgcttttaaatcagggctcagtgctgtctgaggagttaagtttaaaggaaaagtgtgacttcatcccagcatccagaatctagtttgcagatgtttgagtgtcctgtggaatgtgagccattaaacagaaactcttcatcttccagcaatgccagtatcctctgttcagcagggaaaccccaactgtagcaaatcattgagtgaataatgttctgggcttgcatcagggatagatggaggagagccaggagccagcctgcatgctcacagacccatataaagggagaaccacttcctcctcaggagaactcagagaaaccttagcaattcacctgtaccccacacctaacccattccagttgtgccctggatggtggacaggaggatgtaaagggaacataggagaggggagtggacaattccagacctctccagataggcttagctcaaataaccttgcaaatattctgaataagagccagatttcccagggctctggccttttcttccctgagcagcatgatgatgctccattcctgtcttgacaaggattctgtcatggatttcttggttgtgctgcccaggaagcaggtgaggcccaggaacaatgaggaatgtcgtccctggacttggcatgcctcactcgcaagcacaccatatgtgggtcctgtgattgataggtttgatagatggatacgtcctgtttccagccaccagcctctatcccctgaatgctgttgtcaactcagagccacaactctggtcacaaagatggagcaggtagtggcaccttaatgtgaagaaagtttccatcatgcaattgttacctggtgcctacatgagttagactcaaaccagcagctgtttacctcagtgatagaggatttatgacagaaacagagggctcttgtaattctatacccacaggtattcacctgataaccttcacatgtgtcccctaggttttggggactttgagcctgcctcactgaacacatatatcctcgttcccagctctctggacatgcatctccttgtattattgtcttatgccaactctcaggtgcttcatcccctaactcttcccatcctttaccccttaggcaatgaataaaagtatatttgtgactaatgttgccccattagaaaaaaaatgccagatactagccactgctgttcaattgtaacttatactaaatctgtaaggtttttttttttttaagatttcaacaaatctgattttagatttcttttttcttttgttttgttttttgagacggagtcttgctctgtcgcccaggctggagtgcagtggcgcgatctcggctcactgcaagctccacctcccgggttcacgccattctcctgcctcagtctccagagtagctgggactataggcatgtgccgccatgcccggctaattttttgtatttttagtagagacggggtttcaccgtgttacccaggatggtctcgatctcctgacctcgtgatccacccaccttggcctcccaaagtgctgggactacaggcgtgagccaccatacccggccgattttggatctcttactgtattcacaatgatattttcagggataagagagtccccacccatcttataagatatcagaactttcattacattgatgaccaagaaccataggcagaaccatgatgaagacttggtacacaatgcatcatgaagcttgataacagaaaagagaaagctggccattgaccttcaccaaaaatgaacccttccaactctctctcagggtattattttacccctttagcttagagcatgtcagctggttcaacatgcttctaggataaacctgtgtcaactaccccagctcccactctgtctaagctcatagcaatgagaaaatggagaacctggtaagacagaaatgcccagagagaaggatatacagataagacatagaggttactaattgttgtctgtattttgagttgcctttgacacattcaagtagaaacatgcagcagaagatggccctggagatgcagtgggtgatccaatcccccaagccctagagatgtgagtaaagacacttggatgaacttacacacagtccatgaatacgctaaagcaacttctagctctgttttagttcataacaactggtttctaagaacttaggcacttgtggagacaatgatgttactgtaggaactaccgtataaggacaggatgtcccacctcctctgctcctgttcacaaggaccctgaactggcaaagctcccatcctgccctgaccctgccatgagcaccaggcttctctgctggatggccctctgtctcctgggggcaggtgtgtcctaagaacaccatgatcatcccattggaaattccagtgatttcttcaatcatttctgtctttctgttttcaaattctgtctttttccccaacagaactctcagaagctgaagttgcccagtcccccagatataagattacagagaaaagccaggctgtggctttttggtgtgatcctatttctggccatgctaccctttactggtaccggcagatcctgggacagggcccggagcttctggttcaatttcaggatgagagtgtagtagatgattcacagttgcctaaggatcgattttctgcagagaggctcaaaggagtagactccactctcaagatccagcctgcagagcttggggactcggccatgtatctctgtgccagcagcttagccacagcgttgcagagactttctctcctgtgcacaaaactccagggctctctccgctctactcagctcacagcagcctttccttattcctcatcctctcagggaagaagtgagttttcagatatagctagggttcatatagtgggaggaaatgaactattttcttaaaacatgagcgctatagttgttggttgaaaacatgtcttagggatttgaaacacttctgggtgggaattcaagaaaccaaaactgaaagtgatttatcccagacctagtcctcaggggcagtgatggttgttcttctataaaaaatgcacacaatgttgtacgttaattaagaaaataaataaataaacttgaaaaataaaaacatttaatcaccaaaacgtgtgttaaactttaataatatagatattgattacatgcaagtgacaaacagcaggccctccttctgccgttgtcagcatctgaatgatgtgaatcttatctggctctggagcctcttcttgacctctcactggatgtttcatgcagtcaaatctcaacagacactgtgtgtttggaaatcttttccctctgtttttgtggaaatatgacaataataataatattgtaatgatgatgatgttgatcatttcagctatttcattcagcacactttaaacttcaaagaaatgcacacaaatggttatcctggaaacaattcccaaatcttaactcaaaatgaattttgcttctctggagtgctttaacttttcagtgtaacagacacagcccaacactataattaggcctgggccagctagttcagaggctggtgaagacacttccacctgcctgcctacttccttgtctgcccactaaaatagctccttagtgcattagatattcctgccagaacttcagaagcaatgaactgcccctggtccagttgtctcctctgataatgcactgtgtgtgtccaactctagtctctaccctaacttctgcccagattctcctgtactagaactcattctgaagtactggttagaatgtttgggaaggcagcttcctgggaatcctccgaaggaccatggctgtcagtgattccctcgtaacacttcttgagagcatcttgtatttcattgaacgtaggactcccatttatttcagtctgtctgctcctgttcacctctgagatctctgtggcttgtttgtgttgatttccttttgtgctgcttcttggtcatttgttcgtatttttccttataaacctgattatttttgacatcgtgccagacactatggttgtagaaataatttttggtctaggatggacatatctttctccagagataattttattgtgttttgtaaagtgcatggatacataaacaatccaggactccctgaaaaagaattaaaggcttgaggtgtcctggagcccctggagaacaggtttcctactagttccttgtttcaattcaagttcctcagtggtcaccctcagtaagttctggtcttagccattaccccccagcctgtgaatcagcttcctgagagctgggctgggatcagcaaatgcccctaagggcagtgactgctgtgttcactcccccaggctcctgccttctccaagattctggaccagttgtccctcataatgtttttgggatattaattagtttcagtttttgttagtgtggtaatttacccaactatttaaataataacagaagggttaattttgttacaagaaaggggtcctgatccaaccgccaagagagggttcttggatctcatgcaagaaagaattcagggtgattccacagtgaaaagccaaagcaagtttattaagaaagtaacatggtgaaagaacagctactccacagacagagtagggctttcccaaaagtaacaggaggagcgcatctaccctacgtacaatacttgtttatatataggataagaaaagatcgttgagagatgtgctctgctacaagggtttgtgataaaggattaactttcttaattactatgttttgcaagaatcagtattattatctttaaagagaaattaggaatgtttctgttctcaagatattggggtatcatgacactcccaagtctgggtctgtttagtaaacattattaatctgttgctttaaccataaacatctagaggttagggatacctgattttctgggaatgcagcccagcaaggcccagcctcattttttcacttaagatggagtcactctggtttgaacgcctctgacaatttgagtttcctcttctgtaattactcagatgaaggtcaaagaatttcatttaaagttttaattttctttgaatttcaatgtctgattcttagtctgtgatttgcttgatatttaacttaaatagcatagagaaatgttttactaaaactttaatttcgaggaaaggacttttttaaaaacttgaaggggatttataatcaaattgggacactcacttggttttgacattttatcatttagagtattattatgttgttaattacataaccttcgatgcttcattcgaacagggtaatgagaatagagagtaaatatttaaacttcatcagatctttgacacacctgacaaaaacaagcaatggggaaaggattccctatttaataaatggtgctgggaaaactggctagctatatgcggaaaactgaaactggaccctttcgttacaccttacacaaaaattaactcaagatggattaaatacttaaaagtaagacctaaaaccataaaaaccctagaagaaaacctaggcaataccattcaggacatagacatgggcaaagacttcatgactaaaacaccaaaagcaattgcaacaaaagccaaaatggacaaatgggatctaattaaactgaagagcttctgcacagcaaaagaaactatcatcagagtgaacaggcaacctacagaatgggagaaaatttttgcaatctatccatctgacaaagggctaatatccagaatctacaaggaacttaaacaaatttacaagaaaaaacaaagaaccccataaaaagggggcgaaggatatgaacagacgcttctcaaaggaagacatttatgctgccaacaaacatatgaaaaaaagctcatcatcactggtcattagagaaaggcaaatcaaaatcacaattagataccatcctatgccagttagaatggcgatcattaaaaagtcaggaaacaacagatgctggagaggatgtggagaaataggaacgcttttacactgatggtgggagtgtaaattagttcaaccattgtggaagacagtgcgacgattcctcagggacctagaaccagaaataccatttgacccagcaatcccattactgggtgtatatacccaaaagattataaatcattctactataaagacacatgcacatgtatgtttattgcagcactcttcacaatagcaaagactcgaaaccaacccaaatgcctatcaatgatagcctggataaaggaaatatggtacatatacaccatggaatactatgcagccataaaaaagaatgagttcatgtcctttgcagggacatggatgaagctggaaatcatcactctcagcaaactaacacaggagcagaaaaccaaacaccgcatgttctcattcatacggaggagctgaacaatgagagcatatgggcacagggaggggaacatcacacaccagggcctgttggggcgggggggtcaaggggagggatagcataaggagaaatacctaatgcagatgacgggttgatgggtgcagcaaaccaccatggcacatgtatacctatataacaaacctgcatgttctgcacacgtatcccagaacttaaagtataataaaaataaataaataaaataaagttgatcagagagcagagagtgaacatggaatttacttcattcctgcactgtcgtgactcatttgtgccatgttttgtgagcacacctgaggggcaggggtcagaattggagggagtcacaggtgtgtggctatcatcttttccttcccagtcccctggaaaggtgcttggttccacattttccatttgggggaacttccctaaagtgatacactggtttttgtctattatttgccaaatgtttcttatgggaagtgaaataagttatcttatttagtctcctcttcatctgaggttagtctctcttcatcatcatcctttcatcctggctactgagaaaaaaaagtagattcttttggtgctttttcaacatacactaagatcagtggagaactttctttccttacagggttggcctgtagtttgcaggggagagagaatggattaaattctgatacagaatagtgtgggttggcctatttgctctcctatctgagcactattagttattaacactgatattttatctccacttgtctgacttcaatgtccacctctcaggtggttccatcttaggccatagcaacattaagattgctttctgaccttctaacaccaacaaatcataattcccatatctccatgactcaacaaagcaaagcacaagtcccctgtgtcctggcaagagagcagatttgtgctgtttctgcctactggccacaaggaggcactgtggctttgttgtcatcagagtcaaatggggaggggcgaagatggctctctggaagattcttaagggaaaccctgggtttggccctagattcagggagctgggctgtctggaatgaaggctgggaatgaaggaattagagaccaaccaatttgcctgtattgttgtggagaagggttttgctctaaactgagctctgaatggggctgagtggcaggtgtgcttgcagtggatatatgtctgagcgcccttaagatgtggaggcacaagtagctggggtggtgcagtgcccaggttctgggctgggaaagcagagaagcagttttcatgttacaggagccttggagagcctggccccaaacccccaaaccagctcaggccagccctacctgctctgttaaaagtagaaggaagagcagggagagacggaggtgctaccctggaccatcggagggaccctgttccccagtgagggggcaatcacaattacaacaccagtagcatatacacttattaggcagacactagggtggagtagaacagagttttctccaccaagaccttttgctctcagcaggaaaatggcccagtctattaatagttcacctctgctactcacttcagactcctgtgtgtcccctggaagaaggtggggtctgggtagagatagtatcttttcttttggtttgaattaaagttctttccatatgactcgttcatttgcctctacctgtatcttgtatctagcttctgcctcttgtattcatgtgtgccttggacactataaagtatttgatttctactgctgctgtaatgaattaccactgattttggaggtttaaacaaaatacatttgctaccctacaatactggaggccaggagtccaaaatcagtgtaactgggccaaaatcaaggtgttggcaggcctgcgttctttcccagagctctaggggagaactgtttttctccccttttcagcttctagaggctaccagcgtgtcttggcttgttaccccattcaatcttcgaaaccaacagggactgactgagcctttgctcatgctgcatcactctgacactctttgtcctccctcttccacattttaggacccttgtgactacattggacccgcctggaaaatccaggacactctcccagtatgaaggtcagctgattgacaacctgactttgtgtggaactttaatttttcttttacaagtaacttaacacattcctaggttccagagattagacctggacgtggttggagggcctttgttctgcctaccaaacctaggaacttggtaagagggaggaaaacaaaatgatcacctggaaaccagaatactgaccaccgttttacatcccaggcctaacagacacaaaaagggatggagcccacaaggaaatagacacctcaggtctcacaagctcgtctgtaaactatttgctccttaggatcggaaagtactctggggtgcaggggactcagcagtatgcctctgtgccagcagcaaaaatgtggccctaaactgctccttcttggttagcaattaacccagttgaccaacccacagagcagaggcttctctcagctctgtacactctacaccctgagaggaagtcggcttctgagatgcaagactcttttataaggaaaagtccagttgtaaagattaagaaactttgagctttgctagaggtaaaaataggatgtaagtcaactctggagcatttaatttccaaatgtttatgaaaaagacaatcttcttcctgttttattgtatggatagagaatgagagagattctgtactctgggctttgcaaactcactagagttcaagaataaatacactcagagaggtctttcactgcaaagaagagctttgaaatcgaatgaactttcaggatatcagttcggctcctgtatctctaacaacgcagttgacatgcttgcccttcctagggatctcaggggccaactcctaactcacttgtggataattgaagtgcattcaaaggagtaggagcacagagacatcagggagaggaataggagagtttgcagagaatctggcttgctgtaagacaatgagttcatcttgaaataattggagtgtgaggtgcagatgaatatagttggcaagatcctaggtaagatatactatagagaaggctttatgaattggtaatatcaagacaaatccacagagagcctccgtaggtgtgcatttgtgtctcagatcaattatagttcagtcctgcctgattcatctcccagagatgcagcctccacttaaataaggagctttcaaattggaggtggtggcccattcagtgacgtcactgacagatgcatcttgtgtggataaaatgtcacaaaattaatttctttgttcatgctcacagaggccctggtctggaatgttccacttctgctctcactctgccatgggctcttggaccctctgtgtgtccctttatatcctggtagcgagtgagttctccgatatttattatggtcatgctggacctctgtctagatgactccttatattttccttattctttcccccaattctgtcttcttttatagcacacacagatgctggtgttatccagtcacccaggcacaaagtgacagagatgggacaatcagtaactctgagatgcgaaccaatttcaggccacaatgatcttctctggtacagacagacctttgtgcagggactggaattgctgaattacttctgcagctggaccctcgtagatgactcaggagtgtccaaggattgattctcagcacagatgcctgatgtatcattctccactctgaggatccagcccatggaacccagggacttgggcctatatttctgtgccagcagctttgccacagcactgcagaatctccccatctctgtgcagaaaccctggtgcttcctcttctccccacagctctcagcagtcgtcagcaaagtctttcctgctctctgctcaccatggctcacgcctataatcccagcactttgggaggccgaggtgggtggatcatgaagtcaggagatcgagaccatcctggctaacacagtgaaaccccgtctccactaaaaatacaaaaaattagccgggcacggtggcaagcgcctgtagtcccagctactcgagaggctgaggcaggagaatggcgtgaacccgggaggcggagcttgcagtaagccgagatcgtgccactgcacttcagcctgggcaacagagcaagactccatctcaaaaataaaataaaataaaaattaagtgggtttggagaatgacaaagacagaagatggtaggatattaacataaaaaaaatcatgtgtaggggataatgtagaaaatgtgttttgtgaatttctcacaattg

SEQ ID NO: 96 - DNA, 139054 bp, Homo sapiens
aagcttagtggtccaagcagcccacatggacacaggaacctgcccagccagagaagttctgggtcatgggcttcctgacttttatcaagtagtcagtatcagaaccccacagttcatcagccagtaggggcaacactgccatcctgaggcaatttggaaatctgagggcagtgttggttatcacagggacaccagaggcattcagtgggcagtgggcagggatgcccatagctctgatttcagggaattctccacaaaatatctctcacctcaaacgccagttatacccctgatgagaaacacttcattagggagtcacagaatctgttagctcataagaaattcttggtagataggataattataactattggttggtacaaaggtaattgtagtttttgccattgaaagttattaaaagtaggccgggcatggtggctcatgcctgcaatcccagcactttgggaggctgatcacgaggtcaggagttcaagatcaacctgaccaccatggtgaaaccccatctttactaaaaatacaaaagttagccaggcgtggtggcacgcgcctgtaatcccacttaggaggctgaggtaggagaatcgcttgaacccgggaggcagaggttgcagtgagccaggattgagccactgcactccagcctgggtgacacagcgagactccgtctcagaagaaaaaaaaaggaaggaaagttattaaaagtaatgacaaaaacttcaattacctttgcaccaacctaatatttatattattaataaagacccactcgatgaagctggtgaggatgaagccactgatgtccaggtctggctttactgaatataaaacaaacagccaacagccccatgaaaagcagatttctgagtccaaagctccagcaatttaattcaataagtctgatgggatctaggaattgcattttgtagcatgcaatgtgccacaaaaagagtgctaggtgatcctgaggcccagtgtgtgggtggttatatcactgtttgaagactggagaaagtgaaggcagaagccacaaaggcaagacttgaatatgcacaggtgtaaggtagagccagcacgttggagaacggcagaacatttttatgaagttggaaggggtcatccgagcagtacttagggaagttcctacatcatggctggccaagttcaccacgtgtaccccatatgggatacaattctgactcagctgtggctgataatctctttattctaattctccatcccccacccatcccgtcgtttctaacccttcctgatctggagctctctgtttctggtgaaagattctctttgtcaggtttcctagcttctacctccatttcctaacaaaaggcatccctggcatgcccacttctgtcaagattctccgtgatgtgacccactgtcttctcacatccttgacagccagacccatgtaggctggtctgtttctgttttctcatgttccttttcttgccctttatgtagacatatgggttcctacctgccttttgtctattgtgtgtaagaactggagttccccagaccaagtcctcattctgttgcctccccgaacctcctcaccagcattctttagctctttaactcttacaatggtgtgattgtcataaaggaggctatttactgagacatacaaaggaccataatgttccgtaacaagcaacatttatttgctgcttcgaagtggtgtgaacccaccattaaacagtgagtatatattttgtgtcaagttctaagctaagcattgtgcaaaatataaatgtcactcagatgaatataaaacaagcttcttgctctcaaaagtctacaatgtagttaagaagttgtatctggctgggcatggtgtctcatgcctgttatcctatcactttgggaggctgaggtgtgtggatcactttaggtcaggaatttgagaccagcctgaacaacatgaggaaactacgtctctactagaaatacaaaaattagccaggtgtagtggtgtgtgcctgtaatcccagctactcaggaggctgaggcaaaagaatcgcgagaacctggaaggcagaggtttcagtgagccgaggtagcaccactgcactctagcctgggtgggtgacagagcaagactctgtctcaaaaaaaaaaaaaaagaagttgtacctttaacccatcttgcaggttaaaacaaaaacacacctgttattatctgaagaaagatgaaaataaggggaagttgaaatgtcctctttaagtcctctcaatttatcttccacacagctgtagttgtcatgtgattctgaaattgtagaaaacactgaggtgtactggtcttatatcctgaaatgtaatcttattccttcctcccctctcgcagtgggaatgacataggagggagtccctgggtgtttcttcctaacctattaccatgcatctcatgtctgcagtctctccctggctttgtctttgaggagtgcataggaaatggcaggactgacattgagggttgggcatcgaatgcatgaggtcactagttcgggtcattgattgtcatcatccatgtatatatgaagagaacagtttttggatgttttccaaatgccgggaaggtgtgcaaattgcactaatttctcctctcattctacatttctctaataagttaataacattatttaggccctgttcaggccgtctgtcaccatgcagttgaagtatttgtgcgagttgcattctcagtaagtgcctgtttgctgtcttctatatttgtgtgggacaaagaaattatatttcttttttatagctatatcgagcttatgtggccttcccagactttttccgtaattcaactgccaagtggtggaagagggaaatagaagaactatacaacaatccacagaatccagagaggagcttgaagtttgatggcatgtggattgtaagtgtgtgtgtgtctctgtgtaccagtgacacttgtctatctttgtgtgcctacgtgtatgtaccactgaccttcagtcaagaggatagtcattgtccaaggaagactttggacatatcagacacttcctcctctcaggagaggaacagccctgatagccctcacaccttctaccagacctgacattactactataaaacctctgaggcaattgactaggaatttcttggaactttcactgcctcacgcccaccttgagagagatttttttttaaccctctagccagttgttctgtaggggtgaattcatctttctagccagttctcaccaggatttgatgaagctcccagggctggcatctatagggattactggatgttgaacaatgtattcactgcttccttggctcagaattggcaggacgtaattatcttaaaaagtgaggtatgtctgtgtttggcatttctaggatatgaatgaaccatcaagcttcgtgaatggggcagtttctccaggctgcagggatgcctctctgaaccaccctccctacatgccgtgtaagaatccttggccttcttgattggcagagccatgattgaaagaaggattacactggaggagcccgaggccaggggtggccgcacagctcagggcacatcctcatggctgctgtggtttactggggaccagagacaaaagctctgcacgcgctttacccagctgggcatgtgcaagtgactagactcattgcacaaattttttgaatttgtctagaaaacacttacgagtggtcatgccaccaaagggttctcacagctaggcttgttagttttttaggcttatgtgaattccatcacaggaattttttggtgtcatcaatgggtggaaattattggcttgcctttattgtggagctgatggactttggagttacacttgggttcatatcttggttccagaaattgttctctctaggagttttgtgacttttcacagattatgcgatatgtccaaatctcagtctgctaaactgtaaaagacaggtaatgagatcttcttcatagaattatggaaataattggcaagtcaaaagcctaaataagagcctgtcatatagtgtttgacagctgtacattcttcctgacacctctgctttcttcagtgaacttgatgttggaaacactggagccgccgttgcagctcagagctgggggcgctgtgctcatgtctctgggaagacggagagtgacacaggcaggactgaagttagtcttaagatccagggcccagtcccttgaagagaagtcagggagaaacagaatcagggctggatttcacctcaccagttcttcctcctcagatttggagtccagggacaggggcctgagcagcaagaccctgtgcatggagagtcagcagatcctcccagacggctccccggtgcagcactacaatgtgcacaacctgtacgggtggtcccagaccagacccacatacgagtgagtctctgtctcccttctccagctgtcacaacctgtagggattgccagtgactgacatagctaccctacttttcttttcattcccattctaagggttaagaagattctcatgacaactgtgtaatgattcttattagataaacacttagtgacatggagccaggccctgtgattaaaaggaggaggacagatttaaataaggcatggtcccaccagtgaaaagcttaatgatcctagtgggaaagactcacatggagacatcataatgatcacagagggcagccggtggtacaacagcttcagttacaggaggtgaagggaacacagaggactgggcatctctcccctttatttcaaagtgaatcatctttggagttcttttttgtttttcaccattcttggtggaggctaattggtattccactgaattagcacagtcctgctttgtaagctcaattaatagtgtgaattcttctaaggacgatcttataatcttcactgtgttcctcctcaaatatagaaaactaagttttggggaaaccaatagcaagatttagtaattccttactatttttggggcactccagtgagtttgctacagtgaagttctttgtaaagcactgtgagaacacgtgactcgttatctccatcatctgggatcagtggagcccccattacagctcagagtcccgtgttccctccaatcacgcagcaaacattgactaggctcaagggctctgggagcagatgctctatggcctttgcttcctggcggtgccctcagttcacctccttttcccctccaaccagagccgtgcaggaggtgacaggacagcgaggggtcgtcatcacccgctccacatttccctcttctggccgctgggcaggacattggctgggagacaacacagccgcgtgggatcagctgaagaagtctatcattggtgcgtgggtccttcccagggcctgtgccggtagggcagggagttgggatccttggggaagaggtgaggaggcaggtcgtgagagcgagcctggtgtgacacagctgtgcttctcgttgcaggcatgatggagttcagcctcttcggcatatcctatgtgagtgtccttgggatcctcctaagcaccaagaaggtggggacatctttcagaaatcatcagcaggctccttttatttcctcttgtttcagacgggagcagatatctgtgggttctttcaagatgctgaatatgagatgtgtgttcgctggatgcagctgggggccttttaccccttctcaagaaaccacaacaccattgggaccagggtaggacagtggcccctacctccagtgtttcacttgaaacacagcctccatttctgacctaaagttaatgcagtctgtatttcctgtgatatctttaaaattttttttttttttcttttgagacaaagactcattctattgcctaagctggatcttgcagtgtcccaatcatggctgactgcagccttgacctctggggctcaagcgactcacctacctcagcctcttgaatagctgggactacaggcacataccaacgtgcccagctaatttttgtgttttgtagagatgggatcttgccatatttcccaagcttgtctcgaactcgtggcctcagtccccgaaagtgctgggattacaggcgtgagccactgcacccttataaattgttaagcccatgggtctcagtgagccatattcctcagtgttctttaggttattattatgttttgttcttcttgtttgggcagaattgtaaaaaatataccaaaaagaatgtcttacagtgaaatttcatcagctgtcctaggagagcatcagtgaacttttccagtctattaagaatattctctgggcctcatgtgtagttttcttttgtttagctgtgagtgatcttcaattggagtatgctttcagtgaccttcttaaatcccctagaaattccagggcaagctcccaacactgttctctttctcctttagagacaagaccctgtgtcctgggatgttgcttttgtgaatatttccagaactgtcctgcagaccagatacaccctgttgccatatctgtataccttgatgcataaggcccacacggagggcgtcactgttgtgcggcctctgctccatgagtgagtgtccagcagggatcccaatgcctaatggatgacttattgcattctatatggtgacagttgaattcttccaaattaaagacatgattgccttttgacatgagctcttcaggtgcagaccatactttattactctctttagcacagtgctatacatgccttaggtcattaataaaaggttattgattgaatgagcaaaactgaaatgatgcagtatagcatagaataatttctttctaatttggctgtgcaaaggcctatctatcttttgtagcagtttggttatatgtagccagatcacaggagaaggatttcaggaagagatttgagggaaaagggccatccttgcatttgaagtttgccatggttgagaaatggggcaagtattttacaagagagaatacatctacatcccagcatttctgaagtttgaggcacatcccatggggaaagcagaggctgggtgctcctgatgaagctaggcctaggaaaaaggcaaggatggctcaggggcagctgtatttccgacttggatctgaacttgaggagcttcttcagagtgtcgggctggggctctgttgggctctgttgggcaccttcatttccctttccaggtttgtgtcagaccaggtgacatgggacatagacagtcagttcctgctgggcccagccttcctggtcagccctgtcctggagcgtgtgagtatggaggcctccgatgaggggaggatcccagctgtgaggcttggggaaaaggacgaggagaagaggcctgagctggtgggggtcctaagacatggtttcttattctacctgtgtctcttcctctctttctgagctgaagtccatcacttaggtgttcttggcctcagctccttcatctttaaaatgagcctaacaattctggttcataggatgatcaagaagaaaacacctcatggtatattcaatgacacaatcgtttcttcgttaactaaaataaggaatagaagatcagatgggggcagtattgtaaagaattcataacagtcctctagcactattacaacttttcagaaggattgcttggcaatgtgtgtgtacttgtattgctgctggctaacccttcccttcctctgcaggagctcctcccagcagtaaaagccatttctttacttctattgttgattaggcttctgattaaaataccagttaattgcaccttcccaaaatctttttttttttttttttgagacagagtctcactctgtcatccaggctggagtgcagtggtgctatgtcagctcagtgcaacctctgcctcccaggttcaagtgattctcctgcctcaacctgccgagtagctaggactacaggcacgtgccaccaggcccggccaatttaaatttttttttttatttttagtagaaacagcattccaccatgttagtcaggatggtcttgatctcctgacctcatgatccgcctgactcggcctcccaaagtgctgagatgacagacgtgagccaccgtgtccagcccgcaaatcttatggtacccacagaatttttttctgccccagacacaacctcagttgtttgtctctttaagagggaatggcgtaagcctatttctataagcaaatagtgaatttttttttttcccgaagtcctgggtaccaaagtgctttatgaaagccacttgttttggggtagacagatctctcctgtttgaaaaaggaaaagggatggaaggtttcctcaataggtgacctcctgggacatgaggcaagtgggcccaaggccatcacaattatttaacctctttcctaagtattttggtttctctgtcctggaaaatggtgccactgccacaccttgtttatgtttcattttagaatgccagaaatgtcactgcatatttccctagagcccgctggtatgattactacacggtaagtttttctgaatgtttatacaacacgggaaaatggtagagagtacaaaggctttagatctgatagaccttaggtcaaatgctggctctgtaacccacctgctgtgtggtcttagagaagccactttaacccttgtaacctcggttttctcacctccaagtggagtaagaccacttccctcatagaactgttgtgaaatgacacataaagcatctcactcaggtttttcgtgggtgttctctttgtgttaatttttaatattttcttatatcactgctatttacaatgttttgtaaaggcagatgcttttgagattgtgttgcaaactatagtttttgtttttaatgtttatatctttacctgctgtaagtttgtaagcatagaggcctttttgtctctgtctttttattaaatatctccttccatagcatagatgctcaaagaagggcactgcacataattacctaaggtaagcaagtgattaggcaatgtgcaaaacacacacagaggtatgggacccaacccttgtgagtctaagcagtgcaagtgcatttagaaatgaggaagcaatgaagagctccttgccgcatagtttctgtgctattatgttccccaaagacttatctgggaagccagggtcttcccgggcagctctggggtggtgggctcttgctgggaccctgacaagtcagaccctgattcttggggaagaatcaaagaaggcatttccttggtctctaatggggcctcttctgactttctgaggagaacatcgttgagggctggaaatacagcaaaggggtacaagcagggatacaggaagcagagcatgtgctggcccctttcatccaaggggattgcagtgagattaggtgaaaactggagaaggatgtgcattttgttccttctcttctcagtccattggagcccaagtcctctccacagccccagactcctcttcctgctgctagtctggatctgcccttagggtggtaacatgttaaggctctgctatgtgtgtcccagccaggcgtttcccaggaagaggtggccagctttctttacgtgagactggcctttgtcctgagtgtgcatgttgagtctcccattcactaacagaagatgtctttggttgaagaggaaaagacaaaagaaatcatggagcaagctatttagaaaaagatgaaattttgatgtttaattaaaatgaagatgaatttcatagttaatattaatgaagaagtgtcaccttaattaatcttcccaagtttgggtaactattactcattctagagcacaagctggcaaaaactatggcccacagccaaatctggttgttagctgatttgcaaataaagttttattggaacacagccatgcatatttgttcgcttgttgtcaacaataactgcttcttacctgtaaagtagcagctctgaaatgagaggattttgcctaccaggggacatttggcaatgcctggagatatttttggttgtcacaacagagtgggggtgaggaggtgatgcggctgacatccgaggattctgctaaatatcaaaaggcacaggatagccccatcgccagagaattgtctggccccaaatctcaatagtgctgagactgaaaagccctgctctagttgagaacatgtaggatggaagcatggtcccttaggttctgatacaggtgagagagtagcacctcttcctgtcacacatcaggcaaatgtagtttgtacagtggaagcaaaggcaagagaccctaacaagatattatagcagccttgcaagatttcttgcagcactgggtgaatgcagaatgggtaatggcaggtatgttgcaaagggtgatgagcaggcataagttcagaagggaggatgagatgtctggcaggatgcattgttcagggaggggcctgtcctctccttagtcatctcttaccttcttctgcctccagggtgtggatattaatgcaagaggagagtggaagaccttgccagcccctcttgaccacattaatcttcatgtccgtgggggctacatcctgccctggcaagagcctgcactgaacacccacttaaggtaagtgacaggactcaggttttcctttacatgtcagttagctcaacaatttgtaatgaagtccaccaaaatgtaagcatcactctcaaacccacatgcaattctactcaacacttgttttttctttgtttgcttgtttgtattttaacctttttcagactctatactcttcgactaattattaacagctcttttatgtctaagtgggtgagttgataggtctaagagtgtcatctttcaatctcacaattgaaatggaagtcaaaataggagccaccacgattcataatagttttagtatactattgggtctgattgaatatttcctaataaaactattgctgaaaaattgtttattcctctacaagatgttaaaattctagatcaaagtctatgtataaattaaccatagctaacatccagtgagtgcttgccctgtgcctagaactatatgaatatgggcatttccatgtggaaattatctattttttcttagcaaaaggaaaacataaattctgtgaggttagtactgttaccaccatttcatagatgagcaaaaaggctaagtgatttgctcagagtcacacagctactaagtacatgaatgcggactaaaattcacatctctctggtatcaatactaacattcttagactccctattcatttgattctaaagatttaaataaaaatgaagaacttaggacatttgaaaatagaactccctgtatatgtttcagatattaggtcacgaaaacagattttcagcatcaggattttcctttcaaaaggaaaagaaagaacccagttagtctggttgtcattattttaagagccttaaagcagaatcctcttgattcattcactaattcatttgttcatgatatgaagtcatagagccagacagagacagaattagaactaagacacaagtctcttgaattctagtatgcagtctttatcccccaaagcacttccctttgctgctttatgtttgtatgtaaagtcttggtttgtggctgtggctttacttttagctaatgcctctctgcctgctcactgcagccgccagaaattcatgggcttcaaaattgccttggatgatgaaggaactgctgggggctggctcttctgggatgatgggcaaagcattggtgagtagaggttgcctgagattcatgctgatggcactgactacattcctggattatcttacaggcctgctttcaccttttccctattataacaattttgcattttaaaatataatcatttgttaattcaagggtataatccatattggacatgatctttattcctcatgtaaatgaagctcagttctgaatcacctcccattatgcaacctttgtaatccactatagaaggtagcaatatgggagccatggggaaagtttatttgtagccagcggagataaactttcataggatttatggtcaaggacacattcccgaattacatggtttactgtcccagtaagaggggtaatacctctatccgttgtattatttatgggatattttctattaggagtttataggaattggtaaactctcaggaggattgctcaagaaattattagctatttctagacaagtgctatccaatagaactttctgcagtgatgacaatgttctatatcttctgctgttcaatattgtatctagtaggcatatgaggctatcgagcatttgaaatgtgtgacaagtgcatctgaagaattatatttttaattttattcaatcttaacaagcttaaatttaaacgtgttacattttactagtgactgctatcttagacagcacagttctaagggatagccagtggcaactgactgagtggtgagtcatttagaaaagggccagcacagtcgagctcagtgcctcacgcctgtaatcccagcactttgagaggccgaggcagccggatcacctgaggttgggagttcgagatcagcctgaccaacatgcagaaaccccctctctactaaaaatacaaaaaaattagctgggcatggtggcacatgcctgtaatcccagctacttgggaggctgaggtaggagaattgcttgtacccgggaggcggaggttgcagtgagccgagatcatgccattgcactccagcctgggcaacaagagcgaaactctgtctcaaaaaaaaaaaagaaagaaagaaagaaaagaaaagtgaaagaaaaagaaaggggccagcacacaggaaagagtgtgacagccacgagggcagggtgtaggatgggaatacttgaaaccaagctattgactagttcaccttcaccggctgtgctgaacttcatattcttcctaggcctgtggcacacatttaggataaaggacaaagaaggcttttctttgatcatctttgttctctggagatcacatttttaaatttgcctaatacctcaagataaacccaccaagacaccagtgttggtgtttgcatatgtatatgcatataaatgtgtgtgtggagatgtgtacatacagcaaaagaaacctggaaattctgagctggttaggaagatgctgggatggtagaccacaaggaagagaagtgacttaaaaatggtgtcaggaaactgtgttatatgaagtgactctgtcagacagatgtgtctatacacattcatttcaagcattttgtgtaaactgagtgtgggtgcagggtttgattagtctccataaagagcacttacattttaaaatagaacactcaaaagacagaaataaaaacaaagataagccttactctctcaaacaagacaagtaggcaattagaacagcatttatatattctatagcatagagttctacagcacaggtccaggccatgtttatcttgttttttgtttgcagatacctatgggaaaggactctattacttggccagcttttctgccagccaggtgagtgtgattgatatgaagtgagaatagggttccactggcttaggagggtgctgaatatcgtaagggcataaaataccacctagaatttcttcattgctcatcttgctaattcacattcttctacttctctagacttccggtggaaatttactatgctcccaggaggctttctgcaattaaacctatccacatctcatcagtaatgatcattattctagtttaccatgttacaggtggacgggcagtttctgttatctagcccttgttcctgagttgccttggaatggtctgcacattttgggattcctccacctgtagaatataagtatcttaacagctgagactttttgtctcctgtagagttcagggcagtgcgaaagaccctgtagctgcttgtcaatgcaaagtggatgggagttggcaataggccatagagtgatgaaatcatgatttccatgatccaaagttacaagatggtgactctgaagttgtcttactttatgacctacatttgtgcctaaaaagaggttagaaaaatttgaactaattctgctattatatttttcttttatctccaattcaacagaatacgatgcaaagccatataattttcaacaattacatcactggtacaaatcctttgaaactgggctacattgaaatctggggagtgggcagtgtccccgttaccagtgtcagcatctctgtgagtggcatggtcataacaccctccttcaacaatgaccccacgacacaggtttgtgaccagcaaaaagtgcgaatggtattctccacccttaatatgcctagtgcagtgcctgactgcttcccttccaaatgatgccctctcctgccaggccctccgggaatccctgagttttccatgtgttaggaatggaccacgtggagatgaatgaaaaatcatggtttatcatcatttggaatccatggcctggattcttactttccatgtttgtcttcttgtctgcaaacctatgtaaaactttgtcttgactccctcacctctgcctcagagatcaacttcccaaacaggttggaactatcatattttatcaaatatgataccatcagtgaaaattgcttcattatttcatgtgccacaaagaaagaaaaaaggatgacaaaactatgatagaatgcttccttatcactcaattttttttttttttttgagacggagtctcactctgttgcccaggctggagtgcagtggcatgtgatctcagctcactgcaagctctgcctcccaggttcatgccattcttctgcctcccaagtagctgtgactgcaggcgtctgccactatgcccggctaattttttgtatttttagtagagacaggttttcactgtgttagccaggatggtctcgatctcctgaccctgtgatccgcctgccttggcctcccaaagtgctgagattacaggcgtgagccactgtgcccagcctcagatttttataataaacttatagaaagtttttgaaacttctttagccataaagttttacctatatatttcaatattgtaagtgataatatggaggaaaatgttgagtggagatacattgatgattctgcctcaacgtaatttaaaagaggtagaccctaaatgtgaagaagcactagaaatagcttaaccaacttgtatcgtatttaaattgtactatttaaattcatattaaactgttttattatttagtttattgtatttattattatttagaagaaaaatatgtgttacaaattggttaagatatttcctctgtactgcaaaaggtgttggtgattcagcattttataaaaattcttccactagtgtctatgaagtttttttcctgagccactaacacactttatatacattttcatcctagtgctttcttgatcttactaaatattccttcctgtaataatccttaaatgttttcagcccatccattcataacacagtaatagcaatgaagcttacacaggcacagacaataacaattatgccatgagtgctgcttggctcacagtaattctatggttgtcgattacaagacacgctcttgtcagatgaatgttaaatatgtgaaaaatctgtaccttgggattaatgctgtgtagtggtcctgacacttatcatcccgatggtaaatgaaactttcttccttgtgtgcttacttattattttttttcctgaacttttttctttcataatccttcctgatgattaagcctgaaacaaaagttttctttcagttttgcattctttacagttatttcctcatacttgtggttttcttgtcaacaacttccccaactataccataaaggactttgcccaatcctgttgctgaccagctcagggacagacatgcaagctgatgagggcacatgcagtgaaagcttcttgacagcatctgcctaggaagaagcaggaatagtggactcttgctgggcaaacactggggtgctatagtggaataggagaaggaggaaacagaaggatggtgccaaggaaaatcaacacctcagtagaatggaaaagagggcattctctccagtttgtgcagttgtttctcttcagcggttgcatattgaacattttttttttttttgactgagtctcactctgttgcctaggctgaagtacactggtgcaatcttagctcactgcagtctccgcctcccaagttcaagtgattctcctggcttagcctccctagtagctgggattacaggcacctgccaccacgcctggctaatttttgtatttttattagagctggggtttcaccatgttggccaggctggtctcaaactcctgacctcaaatgatccacccacctgggcctcccggagtgttgggattaccggcgtgagccaccgcacccggcccatattgaattatttaaaggcccatctctaccactgaataatctttgtactctaaaaaattagaaaacacccttctcatctgaaactttgaaggcagtcttttaactagacaatacaatgtagaagtattagggggttatttggactggatacttgcacctgatttatttgcatgcaggaaatttcaacaccggatgcccaattcttttcctttggttcctaacaggtattaagcatcgatgtgactgacagaaacatcagcctacataattttacttcattgacgtggataagcactctgtgaatttttacagcaagattctaactaactatgaatgactttgaaactacttatacttcatactcataaaaattattgtgtgttgctaatttgttcatacccactattggtgaaatatttctgttaattttgttatatgttttttgtgtgaaccctaaaggttaaaccttagccctgtgggataggcagttagggaggtgtggaaaatctatgcattaccttaatgtctctgtgtggttagtatggtagtgactgttcatcatatgacatttactgaagatgaactgggtccatgatgaagtgtgtgtatgtccacgtttgtaatcatagaatggaccccattcttttgttaaatacacaagagaaagctttctgtgacagttccaggtcttgaagctaatcagcatctcaagaaagtatccagaaagaacatctgctagttggttataggcggtgggaggaataatatacctaattggttataggtggggggagcatgataagcaaagaaaaggcaaacacaaggaaagatcagatgaaacagaagatgatagtaaaagtgatcctaagtaagaacataatgtaaaattgtcagcagcctcatggggaggaaaaaggaagagtcaactcacttgaagaagagggtcttgagaaatccttagcataaagggctactggtgagattgagatctgagcaggcaaagctcaaaagagagtttggaggttaaaaataatttatttttgcagtagtgtgctttgaaatgtgtaaatcttatttctaatgtatacaaccacatttcacataaaaatatgcaatttatatgccagataaaaataaaacaagtgaatttgcaagtgattttgaattttgtgctattttgaccatgagtaatctctgtttggggttaaggttcttgtttagcaaactcttatgaatttgtctttctggttctcttcggcatcacagaacctacagccaaatccaccaataggatgataacctttataattatcctttttcttacatctctgcaaggagtcttttataagatgtgggtttgtggaagggtctattgattactattttaatcatcatagcagttgctatatttaggaaaataccaactccagtaaaaataggagttgcaaccttcttgcttaaaattctatagggttaaaatgtgagataaggaaattatatattaatgttcaacaggaatattaacttttgatgttacctgaaaatgagttgaaaatgaatgtgtgtggaatgaatgaacctacttctctgtgttttcttcttttcttataaccaggaagccattcattctccctgcacactcatgtgtcagcacctgcataaggctagagacaaacaatattgttaaatcatctaattatcacaatacggggcatttggatgagggcctgagctaactaggaaactggtgaaatatggaaaagcagccatgggaatcctttgatcaaaaaggtgggaaacttgtcagctttcctctaacaaactcaggaaggccacaaagatgaaaacgttatttacttgatatttaaaaaatatttaatgttaccatcaaggatatgttggtggaatttggctctggctgccacagaatgcttaaggagaggcattctgactatataattctgatggctaaggccctagtgaggccagtggggttttggagcacacgaagtgtcagggaccccactgacagcctagtgaaacctacggaattcttcctcacaacattgtttttaaatgcatcaagcaaaatgcatgctatttcaaagaaaacttatcatattacgatacacttatccaaatattaaagatgatatagtaacccatgagatgtgtttttttcattatcaaattaaatgaaaagatccaacagtggaagtaacaatgctataatttcaatgtaatgatcaacatcaacaatattttgagatatccactacaatttcataatgtaatatggaaagatctgtgattgcattattgacaaactcatgtgctatgaaaactactgtgttttgttgtctacattcataacctaacaaaatgctaaatttcagccagaaatgtgtgaaaaagagattatctgttggaaccaatatggcttaccggagttaacgcagaaagagcttgctgacgtcacagcctgaatttccaccacaggttcttactaactccctcccaaatttgcacatgagacccatgatgaggcatgaagagataactgtgcatgcctgaggactttctagatttcctctttcttttaccaatcacctgctaatcccagaatccaccccctaagtcttttctgataaaaatacttccttaaagccagcacaggaagacaggtttgagctggactcctgtgtcctgtgagtcgactttgcaataaaagcttttcttcgaaaccctttatcagagtattggcttctagcgcatcgaagagtgagccctttcgctcaataatacccccagaggttgttcctcagatcacagtctgagaaccacctctcatggaaccatatccatttgtggccatcccagagcagcccctacaacatggacctatgcttacaactcctggccagctattcaggaagaggctgggggccttccttttccacatatgctctgttttttagatcacataattttgctttcttcataggtgtgccaaaataaaaaaaaaaacactctcaaactctttcacttaaataggaagacatctattcctttcttattaatgttataacattaaatgtcatatatacctgcaaagataaggttatgttggccgtggcagatgtcttcaagatctcatcaatatttctttgttcttgtcatagcggcagagtcactgagagttttgcatctggccttggagaaaggtgttctggaagttaagggtgactcatattactagtttctgatctgatgattccaaccagcagcttgctgtgacaactgtttgagttccgccaatagctaactttgccgtgccttgttaccgatagacaactggaagatgtcgggtcacgtgcctgtctctacccttcaaagtggctctgttattttctcattggtcaacaccagtatggtgattcaatatcttccagttactagttagcaagaatggaaggtgaaggtagctattttctgcactttaggaaacaggttatagattagctgggcctgttggttaccactattaacataaatgaagtcacaaatgtgcatggcatgtggggagttaaaggtaaaatatcacacaaaaaatagatcttatgtaacaataaaatctcccttcttgaccttttgccaggatgtcttcccaatttgaaatgagatcttggtacatttcccctctaacaaaggccaccttgtactggggcaaatgaaaagctgaatatgtcattccagcagttcataaatgcagaaaccgagtctctctttctctctctctctctctgtccctccctctctctctctcactttctctctctctctccgtgtgtgtgtgtatgtgtgcttttccacatactgagcatttgaagcaaacacaaaagattcactactgtgaacactgttatttacagttcttaggtgccaccaaaagagctctctgtaccctcatatattactggcaggaatgggggtgtaaaatggtgctgccacattagaaagcagttttgcagttcttcaaaaagttaaagacttgtcacatgacccatgattccactcctaggtatattccaggcagaattttaaaacgtgtcagctcatagcagcatcgttcataacaggcaaaaagtatcaacaacctagatgtatatcagctgatacatgcctaaacaaaatgtggtctatccacgcagtggatactatccagacatggaaaggaacagacactgatacctgaaatggtgtggatgaactttgaaaatatcatgccaagtaaaagaagccagacacagatggccacatattgtattactgcatttatatgaaatgttcacaataggcaaatccataaggacagaaagtaggttagtggctgcagaaacagggggagatgggaatggggagtgaccactaattatttttgggggtggcaaaaatgttctggaattagatagtggtgatagtttcagaattttgtaaatatatttttaaaaacactgaattgtatactttaaaagagtgaatcttatggtttggaaattatatgtcaatttaaaaatccactttagctggcttaagaaaaattttaaaaagatattggtgactcattgaaactccggtaggactagagagtcaggtttgtaggccatgtggctagggacaagccccaggttaccctgtagcggtttctactgccactgccctgagcacatatctggcagctcgcaaccccaaatactgagcataggatgccactaggtctcttgtccctgctgcctctgaaacgagctatgcttccaacatcctggattttacatggtacctccttatctacaccttcttctggatgtaagtcactcacaggaatatctcattcacaaagctccagccacttgcctctaccttggatgaaagaaaggctgtgaaagagaatttctagctgtttctttggggaggcagaatttggagaaaaagtccttaagttgatttaagtaagaggttttctttttctttttaaagaaagatcctccgtttttaaatttttttcaacttttattttagattcagggtctaagattcagggtgcatatacaggttcatttcaagggtatattgtgtgatgctgaggtttggggtgtgattgaacctgtcacctaggtagtgagtatagtacccaataggtagtgttactacctttgtctccctccccacctcccccatcttagcaagaggttttgaaagatgctgagccatcgaagaacatgacaaatgtccactagaggcatcttcccactttaggtttgtatacattctttctcttttattttttttgagatggagttttgctctcgttgtccaggctggagtgcaatagggcaatctcaactcactgccagctccacctcctgagttcaagcgattctcctgcctcagcctcctgggtagctgggattacagccgcctgccaccatgcctggctgtgcagatggggtttcaccacgttggccaggctggtctcaaactcctgacctcaggtgatccgcccacctcggcctcccaacgtgctgggattacaggtgtgagccactgcacctggacgggtttgtataattgctactttaatggtacttcactatttagaataattggtggaaaggatcatttgaattaatgaaaagctgagttataccaagagaactctggaggatgaaaatggagaaaagaacaaagtgatgaactaagagctaatccttctttcacttacttattaaataaatagctatatatttaaaaagaactatggatattgggcagagtgctaagcacaggagatacaacagtgaagaagatagacaagaccctagctcttgagccctttaggctacatgtatagatgaggaaacataacgtgacaagtaatcagatatgaacagggatacagaagagggacaatgagtagaaaaaaaaccaccttccccttttattaacaaaaggagctttcattctgtgtcacatggagaacaagcgttcttttatgacctattggaatatgcactcccctcctccagttgctgtcaactttataaggcaataaattaattgtggcagaagctggctacctcagcccagttacctttgctcagtgctccctatgaattgctgagggagagatacagcatagaaaaaaacaaggtgatgcggtgagtacgcttctccatgcaagcagggctttgaacaagggcaggaaggtccctttctttttgtgtgattttctgtctgctgctctgttaagtgatctggatgcccatgttttccttctggacttaatattttcttccttttccataaaatatgaggagtgaggatgagatagttgatggagaggagagactgtgtgtgtgtgtgtgtgtgtgtgtgtgtgtgtgtgtgtgtgtgtggtgtcagtgtttggaggacaggttgggggaggtctggtgtgagatcctcctctctcactgggagaaattaaggacagaggaaacagatgggatccttctggaaactatctcaagatggcatggatttggaggaaggtgaattcctcccagctttgggcaggaagggtttctaagtaggcaagaatttctacctttaggaatccccatcctgtcctctgcctgaatgacaatagctcctaaggcaggaaaatacccagggttattcccagagcgttcctgtacttcctgagctaaggtgctgaacctgctccctcaggaggattgaggagctgtggagtaggtccctgctgctgatttttagaagctagaaagaaaaaagtctccctgtggagagaaataatacttgcagaaagagaccaattgatgaataatgcctttgctgtggtattgagttgtgggctgtatgtataagaaacgaagtttgataccatagcactcttagggtaggtccttcctacttctttctctacctgaaattccaccattggagaccgatcctctaagtctttaagctctgcagcctaggatacattgtcgagagagtattcaagtactattttaaaaagtagcggctctcggtgtttgtctcagttccaccactaaccgtgactagacaaaatttcttaatattcatctataaaatggaaatcatgatatctgtctgatcagcttcaatgcagggattttatgagaatacagtcatatgatatatattttatagggattagagtatatcttttaaataatttagactaaaagagagacaactgattaatttaggtaaatagtaaagaatagttaataaacctcaattttaatcccaaacctcgtgtctccaagggctaagggttcttcctaaatgcctgttggcaaattacctgtaggtcctagttccttacctctatttcaatattaaagtgcttcttttatggaattattacacattaacctaaaggctactgtaattaaaaattgaagctatatacctatataaaaatatttgtagaaatggtcgtggcattggggaggagttgagaagagcagggaggcagggaaatgaaaagtaagaggagatgcaaaatcaacataaaaataagagagagaacagtctttgtccctgctgacttatatttaatagcttgttgctgcataagtgctggtttagtatggtgggaatatggggagaggagacgctgagcagctggggttaggacgtgccatgaagacctttgatcacaaagctaaagggtttttggtttattcagagatccattaaaggcttgaatataggagatccaaatgaccctgtttgtgctggtcacttgggtaatgacccaaagataccgggaaagtagtctgactgaactgttaactggctgtgagaactaacagaatgagaggaattaaaaaaagattcctaggttttttttttataatgtgattctattcctcaagttattaattatttgaagaacagataatttggccaaattggcaggaactgggagtgaggtgtggggagagatgatttcatgtttaaacatgttaaatcttattgaatctgtgggacatccaataggcagttgaatatatgaatctaaatccctgggctagaaatacaggttggattgccatcacatgtcatataaagtcacatgagtggtggagattacccaacgtgtctgcgtagtttaaaaaagaagcctataccagaatttggggggcatcaacatttaatgaaatagggctgagcgtggtgcctcacgcaggtaatcctagcattttgggaggccaaggcgggcggatcacctgaggttaggagttcaagaccaacctggccaacatggtgaaaccctgtctctacaaaaatataaaaattagctgggcatgatggcgggtgcctgtagtcctagctactcgcggggctgaggcgggagaatcacttgaacctgggtggcggaggttgcggtgagccgagatcgcgccactgcactccagccagggcaacagagcgagactccatctcaaaaaaagaaagaaagaaagaaggaaagaaagaaagaaagaaagaaagaaagaaagaaagaaagaaagaaagaaagaaagaaagagagaaagaaagaaagaaataggagactacaaagaatattgaagataagccagaaatagaggtggaaagccaagattcctatcaaggaatccatatgtggaaagtttcatggaggagaaagtggttaagtgattaagacagcgcccattgtattcagccactatgtcactagtaacctcggtgggagcatttccagtggaatgcagaaaacacagccaagccaataacacatgaggaagggaatacagaaagtgtggaactatcgttttggaagattggcactggaaagaaaaagaatgttattatgctacctgcagaagcacacagagtcattaacagagtttggggtgacttggggtatatttatgaaggaaagatattcagagagtgaatttgataatgcaagacaataagagataattggtggaatgaaatttttgagaaattcaacagctgtgagatctagataacagatacaaggattatgcttaaacaagaagaggaaaaactgtttcattgagaatagagggggaaaaataagaatttacctagatgtgaataacctttgtggaaacgcttgggttgagaagcagagagagagaatagtttctgcaaaatcattattttttgggtgatatcagagatgatactgcatgagaataagagtgtaggtaatagagtcaggcctgaaaagaaggatagaaggaacaattttttaaattacaggcacggtggctcatgctgtaatcccagcactttgggaggccgaggtaagtggatcatttaaggtcaggagttcgagactagcctggccaacgtggtgaaatcctatctctactaaaaatacaaaaagttagccacacgtagtggcatgcacttgtagtcccagctactcaggaagctgaggcaggataatcccttgaacctgggaggtggaggttgcagtgagttgagattgcgccactgcactccagggtgacactccgtctgcaaaaaaataaaataaaataaaaataaaattactgctgcgaaaagtgagaggcactgtcaagaccatcagtcggcttgcaggcccagtttatttaggagattatgagcctcggtggcatctcccttgagttacgtgcggcagcacagaaggcagatgtttggatggatagtttcatcctgcagattctgttagcagatagagagcgaggaagatgagagcaatggcaagttaaataatcaatactgaggcctaggtcagttagggttaacagctaggaagggctaagagattaaaaggaaatggaaagataacagctgccttgatgtgataagatacttttttaaaataaagtaaggcaggctgggtgctgtggctcatgcctgtaatcccagcactttgggaggccaaggtgggcagatcagctgagatcaggagttcgagaccagcctgaccaacatgaagaaaccttgtctctactaaagatacaaaattagcagggcatggtgacgcatgcctgtaatcccagctactcgggaggctgaggcaggagaattgggtgaacccaggaggcagatgtttcggtgaggcgagatcgtgccattgcactccagctgggcaacaagagtgaaactccatctcaaaatatataaataaataaataaataaaataaagtcagacaatgagacagtaaaaggacattgctcatttgcatatggatttacaatttcaaaagtgtaacagttctggggatgataaattccaggggctagcaaacatttgaggatgatggagatggaatggcgaagaaggcattgcagctgagggctgtcatggatctgtagacatgtaataatgttagatttactataattagagcagaaaaatgagaacacatccagtgtctgatgtcatttttgtagatgaagaaatacaggtccaaataggtaaatagcccatctgttagtaagaaaatcaggacaagaattcaacccctttgattcccagttcagtacatcctccaatatagaaaatattttaaatcttgggtcaataaatgatcttcggggttactgggagccacgaaatttatgtgagttgtttgctgtgaacctcccagcaagacttatgctgggtatcaggatcatttttgttaccagatccttgagagtgtcagtgacgtttaaacagtctcaacagtgacttcagcatcatgtccagggcagttgaaagaagaagacttggattccagttttgctactttctctctccctgagcataccttcctgtctactacattaggtggatgtgaagatcaaagtgaaatctaaagggttttgtgagctacctcagcccctcatctctcttctgtgtgttattccacaacattttcccttcagttcttcatgtctgatatacttttccttggacaatcctcagttcctctacatgcaaaaaaggcaagagctctacaggtgttggatgtaaagctagagttaattagggacactgataagtggaaacaaatattctttagattatgtaaagaggatgctgataatcaaggtcatcttgcaaacaattccacatttggatacaatgattatgtatcctcttagattggtggggccttgtgatttgttttaacccaattatctgtgtctatctagatggcgaggaagctcagtgtattggaagtccttctgatcatcttctgcttaattgtggtgaccatagatatcctcttgctgcttcttgtgttggaggaaacttcaggtaagggagatgcttgtaggttggaaggctgggtaaaggaagtctcctgtaaacgccaaagagattattttattcttttacttttcaatatgccactacattgcagtattcaaaattcacttccatgattagtttaagttcaactccaaaagataagtgttctttttctgcactgaaaccttgaatgttagtgacatttagggtctcccaagccccatttagtgcaattttaacaagatgcaaaattaggctcaccagatgcctgcccttcaacccagagtcatgaagtcgtactgccttcaatgagaaaggactgttaagctaacagtgcccagccccattatattatggaaaaggaaactaaggttacagggaggtggtgggatgattaagttggcctggttataccaacatacatagctatagtttcttcataggtgcctttgaaaccgttctgtctgtctgtctctctctcaggcacccagaagcatcaaacagaatgccttctctttcacgcacatattataatttaaataataaaatgtgtgtagttcaaaaatgtattttcagttaaagctgaatttgggctttgttctgcttgacaagctcactttacagatgtgaattgaacctacagtgaaaagaagctgtcctgatggcagaaccctacctgctccatctcttttcacctctctccacagtaaacattaagacactttctaggaactattacaactttgaaagatgatctgaaaaccattgatataagccattttgagattattcctacttctcccctctaacacatttttcgggtaacaagtctcctgagattgctatccagtgtatatgactaattggtttattttatttgatataaaactagatcttcacacctgcattcaccttaaaccacattctgatttatgcagagtagttctgctttcaactgtttttttttcttctgttttttttttgaagatgtatttccatgggttgaaaggggggctttaaaatcaatttgtttttattgtggtaagaacagaacagaacatctaccctcttactggatttttaagtgtataatacagtattgttatctattgaaacaatgttgtacatcagatttctggaacttattcatctcgcataactgaaatgttatactggggattagcaactccgcactccctcttccccctaactcctgacaactaccattctcttctttgcttctgtgaatttgactattttaaataatttatgtaagtggactcccagagtatttatccttttgtgactggcttaattcactttgcataatgtcctcaaggttcatccatgttgttgcatattgcaggaatccagttttaagacaattttttattgaaatatatatatatgtacacaaacaaatgtagagccgtaaagatagtgatagtgaatatatttgggggctttgttttgaatcaaaacgaaagcactaaggggcacctgctaatacccacggtaactgtttcctccaaattctgctgaaattctggattttagatggttcatggagtccatgaaccagtcctacttctgctgttgtcatggggagaagattccacaaagttgataaagcctaaagtaagaatagccaatgttgagtgaagatgtgtatttccaatggggccaataatatcttcctgatatgtagcctgagccctctggtgtctttaagcagctgtgcctacaaataagagactaaagaaaaaacagtaagaaaaaagactttcccagcgatttattcagggcttccctggtaacaacaacaaaaaaatgttggatctctacctgacaacatatataaacattgactcaaaattgatcaaagacttaatataagagctaaaactataaaactctaggaacatgtaaataaaaatgtctgtgaccttggattagataacagtttcttagatgatacccaaagcacagcaaacaaagaaaaaaataggcaaattggacttcatcaaaattgaaaaaaactttgtgctttgaagcacactttgaagaaaactatcaagaatgtgaaaaacaatccacagattcagggaacatacctgcagatgatgtatccgatgttaggcccttatcagatatatcatttgcagatatatttctttttacatcctaagataatacattggaatataagagaatatattctcttaggatgtataaagaaatactacaaatccaaatttaaaaaaaaaaggtttctaaatgagtaaaacatttaaatagacatttctcccaaggaaatctataaatggccactaaacccatgaaagtatattcaacatcattggttatttgggaagcgcaagtcaaaacaataacatatcactttcacacccactatgatgactataattaaaaacagataaaaacaagtgttgttgaggttacagagaaactggcttctacatggctaagatggtgtggttactttggaaaactttgccagttcctcgaaaagctacagatagagttaaccacatgacctaacaattccacttctaggtatataaccaagaaaactgaaaacatagctcacagagaaacttacgcgaatgctcatagcaggattatgtataatggtcaaaaagtagaaacaacccaaatgtacatgaaccgatgaatagataaacaaaatgtggtatatccacacacaaaaaatgtgattcagccattaaaagcaatgaagcactgatacatactacaacatggattaacctgcaaaaccttatgccaggtgaaaggagccaggcacaaaaggccacacattttatgattctttttataggaaatgttcagaataggcaaatccatagtgatagaaaatagatgagtgtttgccagggattgggagaacaggggaatagaagatagctgctaaagtgtatgttatttctttttggagtgatgaaatcgttctggaattcgacagcggtcacaggttgtacaacttcataactaaaaaccattgacatatactttaagaggatgaattttgtggtatataaattgtatctgtttaaaaagcaaacaaagtagaaataaacgtgtttaaacttggagaagtgttaaacatcatgtgcaaatatagataccagtttggagaagtgttaaacattgtatgcaaatgtagataccagctaccggtgatctgttgtgtggagaattggccaaaagtctgtaactttgctggcttccttcctggagctgtgattacactacacattttcaactttatcctttaattcctatgcagatacttcatttactccagagtgcccagagattccccagtcggaaaggatagactgcacacctgaccaggaggtgaccgaggtcagagaaataaggtcccttttggtggcctacagggtgttattgaaaagaaatgaatatgtgaagtggggaaagggtgggggtggcatggcttctgggcctctgatttgtttggagttctttctttcttatcttattgaaataacaatattaagatcgtgagggaagcagggttgaaaaaaaggaagagtaggaaaagctaacaagaatgttaatctgtggattataaagtccaaggtggagggcgattacaggtgttactaaatgtaccttaggtgtgattccaaggatagtggtagaaaggttaaatgtttgtgggctagactatgtattctttgagaatagaggccattaagcacatgcaaatagggaaatccatagtgatagaaaatagattagcatttacctgagtcactggctgagtcacctacggaactcaggcaaattgttacaagagccctctggattatgttattggcaatagaggtcccaatggatacgtgctaaggaacacaggttttctcccagagtagcttccataaaatatcagcgacttgaaccctgattagttgtgacttaggactttttcataaaggttgtatgtatttatatatttaaattttatttcttggccccatattctaaattctatatcttcttgagatattaattaggacagtattgaattttaggttaaagtttaaacaatattcacattttgatagttttgaatcttcttgttataaaaacatagaaagtgtctccatttcagttcttttcatatatacatatatttctttcttttcttttttttgagacagagtctcaccttgtctcctggctggagtgcagtggcgcggatcttggctcactgcaacctctgcctcccaggttcaagcaattcttgtgcctcagcctcccgaggagctgggattacaggcacctgccaccatgcccagctaaattttgtatttttagtagaggcagggtttcaccgtgttggccaggaggcctcaaactcctgaccccaggtgatccacctgcctcagcctcccaaaatgctgggcttacaggtgtgagccactacgcccggcccatatatgcatatatttatttcttaactgagttttatgtttctcttatatgttttattgcatgtgaattatgatgttttccctacgtatttcacatccttggtttctactgtaaatataatccattatattttgtaagttgtgcttcttttattataatgcttcttttcttactattattttatttttatatttattatttttactttatattatgtttacacagtatatttatattctatttattatataattgatcaagttaaatctcatattgtttataaaaaatgttttgtagtccctcctctggatattaagtatagaattatattataggaaaataaggataatttttctttgtattaatattatcttatacattcatatgtctaatcgtattgtctatttcttccagaataatgtaattaaagtgatgatggttggcaacccttattttatgcttgactttaatggaaatttgggcaaagtatcaagcacaaagttagctattggcttaagagaattgttttattgatatatgttaggaaccatctttatattcttattttaacttttttttaaaagaaatggaaaatggattttttccaacaatttagtattgaactttgcaaacaagtttacaataatactcattacctcccacttaaatttcaccattaatattttactttgccttctcgtatttatcacttatcccacacttcattcatctattaatctatctgatttctatggatttgaaagtaagttctagaaaccagttcactttttcataaatttctcaccaagtatattattagctacagtccaaagtttgattatagttatttatcttcagatattacacttatatacaatgcaaatacaaagagttgttattaatacattttgcacgattctttggcacacatttgttgaattatggcaaatgactacacatgtgtaagccaaaccattctatacccaaagatacagaatgttaccatcacttcagaaagttatcttatgacatttcccaatagttattccgacttgtaccccttaacaggtaatcactgatatgatttatctccaccttagtttagttttgcttgttgcagaacttcatatgaatggaatcacatagcgtagtgtaaagcctctttcattcagcacatttttgagattcatctttattgttgcaaatattagataattctttgtaccactgagtgatattccattgtatgagtatgccatagtttaaccattcttcccttggcatatagtaggatgttgtccacttcatccatattttcaaatttataaactttgagttctattaaatatgtttttgttgttgttgttgttgttggatgaaatctcgttctgtcgccagactggagtgcactggggcgatctcggctcactgcaacctctgcctccccggttcaagcaattctcctgcctcagccttctgagtagctgggactacaggcatgcaccaccatgcccagctaatttttgtatttttagtagagacggggtttcaccatattggccaggatggtctcttgaccttgtaatccacccccttcagcctcccaaagtgctggaattacaggggtgagccaccgcgcccgacctcaaaattatttttatgagatttagcctattgttaggtatagttatattcttttttttttttctgtatccaccctactcttgataggcaattgtgagttttcatctagagattttttttttacagcacgattcaaaaaaatttgcatcaaatttttgggtatcttcgggtgaacagttggaataatttttattggctctatacctaaggatggaactttcagtctataggatatgtacatgtttaactttagctgacactgcaaaatcatttttcaaagtatttgtatcaatttgcatttcttttagtagtatacaggagttcatttgctctacatcctaatcaacgcttggtgttttctcctttttcaatttaaccattctatggttttaattttcatgtttctcatgactaataaggttaaatatctttagaaatgcttattggctagttggtaatcatatttatggaatgtctttttaactttttgcctttttttctactgaactgttcatcttttttattgctttgtagtagttacttatgtattctggatacaaatcctttgttagatatatatcttagtctatggtttgtcttttaactctcttaatggcgactgttgatgacaaatagctcacaattttaaaatagttcactttatcactttttcaatggttggttcatttcatattctatttagtaattcttgcctactccgaggtcagaaaaatatattactatctttcccttaaaagcattattgttttatccttcaaatgtaggtcttttatgaatatagtactgatttttgtatatggtatcaggtaagagtccagaaactttttttttttttttttttttttttttgagacggagtcttgctctgtctcccaggctggagcgcagaggcgcaatcttggctcactgcaacctccacctcccaggttcaggtgattctcacacctcagcttcctgagtagctgggattataggcacccgctatcatgcctggctaattttttgtatttttagtagagatgaggtttcaccatttttgtcaggctgttctcgaactcctgaccttgtgatccgcccacctcagcctcccaaagtgctgggattacaggcatgagccaccacacctggcccagaaacgttttttttcttgaatttttaatcgatccatcaccacttattgaactgaccatctttttccctctgcattttagtgacacctttcctgtaaattatgtctttataggtatggatctgcttctggaatgtattttgttgagttactagtttgttcttttgccaataccatacagccttaataactattgctttatgataggtcttaatgtgtggttgtagaagtcctccaaatcattcttacttttcttcaagattgcctagcttattctttgccctttaggtttctgaatacattttaattttaatgtctctcataccagcctgccagttttctcacaaaacttactagaaattttattgtgattacataaaatttacaggttaaatttgggaaaattaccatctttacaagggtgaatatttcaattcctaaacatggtatatatctttctatgtactgagattttagttttgaaatttttgatatagagcttttgcacatggttttgctacttttttcctatttgattctattcaaatcttattcttaaattttaattttctgtttctcttatatatatagatttaaaattgatttttgaatactgatcttgtaactagaaatcttaaatttacttattaattgtcctagtttgtagactcttgtttttttctgacatgataatgttacctgcaaataataacagttggaagttttttccaatgtgcattccattttcttccatgtcttttaactcataggttacaagattctcttttctttctaaattgtcaatatagtttgagacagtttatctgaaaggcaacatgcagctatggtaggttttagaaaatggaacttcctggagactgattttaactaaacctaataaataacattgaataaaatactaattatagaagaggaatttcctggttttggaagaagttggttacatatcatttacagattttcagcatctatcagagactctattgaagaaatccctgcatcaaatgaaagttgtagtagataatttggggtctgggatattggtaatggttgaaaactgaagtagggatgttagagcagaccacttacttaaatgtttattgctttttatagaggtctgtggactttgaaacaatttatgacaatgaaactgaccttttgaattagactgaccccagtttcagagggagcagagctacttaatgtctgccttaggaaaatcaattatctacaggccacccagacccccaaattctttcttcactgatcccttccagccttttttgttatctgaagacaatgagacaggaatgtcaattagatttatggagagttaataagtatatttaaaaagattgtatggttataatataattactttgtttataataggtatgaagcactgacttaagttgtatttacattgtggcttttcaggaaaatgacatcagatgttagcatctgaaatacttgtcagcactacgcctttttcaaatgagtagtgttgtgacatattcttgtttttggtgtcacaatccacactgaacacagtcctttaacaggaaagattcagacattatagttatgtacagaacaaaatgagaaagtattaatgtttcctgtctatctccaaattactccccccagaatcacccagaatcaaatcaatggcttagtgtatatccttctcttgatctttataagcttttgcatctatatatttattttgttttaacgaaaatttgattatactatatatttttccaacttgctttttaaatttaaggcatttgaatttaccacattatatttttaaaataggttgcttcagttgagattaccatatgattttcttttgtcagtgttgtgaattatgttaaaatattttttaatttggaaccattttcacttttgcttaatgagacctattcatatattgtgtattaattcttttaatatatgaacgaattcaaattgctaatattttattgatatttcgcacatctatgttttttaaatgaaatgggcctatgtatttttatttacttgtttatttggactgtcctttttcagtttgttaccagaactattctagttttataaaatgaattaggaaacttttcacctttttctatattctgaaaatacagtatatataatatgaggatattttattcctcaaatcatttgggcaattttttttttttagggaaagattcttaactatctttcacaatttttcatggtcactggacatttcaggttttctatctcctcttagacaattttgattatttaaattttactgtgtaaagatttatttaatttagagtttcacattcattggctaatatttgttatgaataagttttctcatgattcttactcattctttatatctgttgtcattttttattcttgtgttaagccttgtttgtttcccttttttgtcaaaataagactttaagatatttctatttccttgatctttccaaagaaacccttagattgattgatttgccagactaataacaaaacttatcctcacactatagtaatatcagtgtggagttataacaggaattgacatataagccatttgaatataataagaagtcccaaaatgcatattcacatgcttatatgtatgcacttaaatttagtttataatgaaaatgacactgcaaatcagtggtggaaacaagctggatatgattaatggtggtatctgtcttcctgtccttgcagacaactctgtgccactggaatctggatgaattctttaaacagagcaggcactcaatggatgttttgaattgatgaatgtagttacttgcttctttataattactgttttagtttttattattttacacacttttgtgggtgtattttgtacttttctagtgtcttgggttgtacattgagttgttaatgatccatgacattttatttgcttttctttccctaatttgtcttctcctttctctttctggagtcttcttagttgagtgctgctatctgagtctgtcagtcacttcatctactctttctttcatattttccattttttttatattattttctgggataattgaatttgatttttaaagtttttttcataacacttctctttggttgttttcttttgtaattcagtttaaatattcaggagctttaaatcttgttctaaatcttaacagtacacattcctcatttttttaatggaagtgatatggtttgatcctgtgtccccacccaaatctcaccttgaattttaatactcccagtgtgtcaagggtgggccaggtggagataattgaatcatggggcactttcccccatactgttcttatggtagtgaataagtctcatgagatctgatggttttataaaggggagttcccctgcacaagctctcttgcctgccgccatgtaagacatccctttgcacttccttcatcttccaccatgactgtgaggcctccccagccatgtggaactgtgagtccattaaatgtctttcctttataaattacacagtcttgggtatgtctctgttagcagcatgagaactgactaatacagtaaattggtaccaggtagtggggtgctgctgtaaagatacctgaaaatgtggaagcgactttggaattgggtaacaggctgaggttggaacagtttgaaaggctcagaagaggacaggaagatgtaggaaagtttggaacttccttgagacttgttgaatggcttttctcagatggagatgaggaacttgttgggaactggaataaaggtgactcttgctatgttttagcaaagagactggtggcattttacccctaccctagagatctgtggaactttgaacttgagagagatgatttagggtatctggcagaagaaatttgtaagcagcaaagtgttcaagaggtaacttgggtgctgttaaaggcgttcagcttatgtattcatgaagatatggtttggaattggaacttatgtttaaaagggaagtagagtataaaagttcagaaaatttgcagcctgatgatgcaatagaaaagaaaaacccattttctgaggagaaattcaagccagctgcagaaatttacataagtaacaaggagtcaaatggtaattgccaagacaacgggaaaaatggctccagggcgtcagaggtcttcagagcagtacctcccatcacaggccaggaagcctcggacagaaaaatggttccatgggccaggcccagggtctcccctgctctgtgcagcctagggacttggggtcctgtgtcccagcagctccagacatggctaaaagggacaaaagtacagctcgggccatggcttcagagtgtataagccccaagtcttggctgcttctacatgttgttgagcctgtgggtgcatagaagtcaagcaccgaggtataggaacctctacctagatttcagaggacgtatggaaatgcctggatggccaggcacaagttttctgcataggtggagtccttatggagatcctctgctagggcagtgcggaagggaaatgtggggtcagagccccaacaaaaagtccccactggggcgcagcctagtgaagttgggagaagagggccactgtcctccagcccccagaatggtagatccactgatggcttgcactgcatgcccggaaaagccgcagacactcaatgccagcccatgaaagcagccaagaggggggctgtacatgcagagccacagaggcagagctgctcaaggctgtgggagcccacctctcacatcagcatgacctggatgtgagacatggagtcaaaggagattatttcagagctttaggatttgacagcctcattggatttcagacttgcatggggcctgtagccccttcattttgaccaatttctcccatttggaatgggtatatttacccaatgcctgtaccccattgtatctaggaagtaactaacttgcttttgattttacaggctcataggctaaagggacttgccttgtctcagatgagactttggacttgtacttttggattaatgctggaatgagttaaaactttaagggactattggaagggcatgattatgttttgaaacgcgaggccatgagatttgagaggggcccggtgcagaatgacatggtttgactctgtgtccccacctaaatcgcaccttgaattgtaattgaatttcaattgtagttgtaattgtaattgaaatttcaattgtaggccaggcgcggtggctcatgcctgtaatcccagcactttgggaggctgaggtgggtggatcacctgaggtcaggagttcgagactagcctggccaacatggtgaaaccctgtctctactaaaaatacaaaaattagccaggtgtggtggtgggagcctgtaatcctagctactcaggaggctgaggcagtagaataacttgaacccaggaggcagagattacagtgagccgagactgcaccattgcactccagactgggcaacaagaacaaaactctgtctcaaaaaaaaaaaaaaaaaaaaaaaaaaaaaaaaaaaaaaaagaaattcagttgtaattgaatttctcacctgccacattgcattttattttgctgttttataaacagatttgtaatttttttcttaaaatcatttctgtcatttcatgtaaatttagttaggtgaggaaggtgaatgcctgtgtttattctaacacagtggtctcagttgccatttgttttatttatcataacaaaataattttatgtaaattaacctgaaaattataagacctttacaaaataaatcttgctaaataacaccaaaagaatatttataatcaaaccactctgagaaagaaccacatgtgatttgtttttgccttggacatagcagagatattgtgaatttctatgttaccctctgtcctagttttattttaatcgtctctagttttcttagcttcactttgcttactttttggaaatgcatttcttcttttgctgtattgttagccacttgcatgactctttctcatgggaaagtccaaacttcttggactggcttccagcccactcttggtaaaaatactatgtgatttccagcttcattctcatacttaatgtttttggcacaagaaatgtgtggtttttctgagtctgtcatgcactgctgctttctccgccaggaatactgttcctctgtctaacctcccctggtgcttcatgatgggacttacctttcacttacctggaagctctccctaccccactccacgcctactaggctgggtacagtgactgtgtgttccctcagctcctggacacacttggtggagccctcatatcatcatactgtatgtaattgctttcctaattgtatggatttgccactagacagtagtttgctgaaggcacaagctatgtcttatttatctgtattatcagttccatgtctggtagataataaatacatattggacagttggatagattcatgaataaataaagaacaaataaattaatgaatgtaattataacctatcttaaattctccttggaataaaatgggttataaataaatagacagataatactttccttccctcagtttatatactgctaactctgtgtcattgttacaggatatctgcagatggcaatataagtgctgctggtcgcctgtggcagatgccaatgtccctaggtgcttcttcccctggaactggggctatgaagccagcaatggccatacaaatacaagcacaggtgagcactgccctgatgttgcgcctgggaacaactccttatggcccagatacgttaactgcaaaataaaataaaagctaaaagtcaggcaggcgtggtggctcacgtctgtaatcccagcacttcgagaggctgacgtgggtggatcatgaggtcaggagttcaagaccagcctgaccaatgtggtgaaaccccgtctctactaaaaatacaaaaattagctgggtgtggtggcagctgcctgtaatcccagctactcaggaggcagaggcaggagaatcatttgaacctgggaggtggaggttgcagtgagccgagatcacgtcttgcactccagcctgggccacagggcaagactccatctcaaaacaaaaacaaaaacaaaacaaaaccaaacactaaaagttagtctccttttctctctctccatatcttgccacccctaggatttactgcccagttgaaaaggttgccatcaccatctctgtttggaaatgatgtcgccaccacccttttcacagctgaatatcagacatccaatcggtttcattttaaggttggtttgggagtgactgctaaatacatttctgaagaaagcagtgtgctcacattgggcttgaagtgtggaggcagaaggtacctctctccctctctgcaggaatctctggatggcatgggcaggctaatttttatttgatggggcacatgtaattgggtgatttcacaaatcagaagccacaaggtgaagaattagaagctattctcatggggtgtcatttgagatggaacatcttttgtagctctgtctacaaggaagtggtcttatctgcagttgtcccttctgtttttcttttgacagatcactgactttaataacatacgctatgaagtttcccatgaaaatattaacctggttgatgggattgctgatgcctccaatttgagctattacgtggaggttactgataaacctttcagcatcaaaataatgaggacaagcaacagaagagtcttgtgagcttttcaaccctcttggtgcatctttgaacacacagttctaatattactcattctgatttactgggggtgggcagtgaaatcagtacaactagagaaaatgtttgaatattagaaaaatgtccaagggtttgctgtaaaataacagtgttagcctatcatgctcgtaaaacagagaatactaaaaggtaatactaaaatgtttgctaagttatataattttatataattatataatacataattatatgtaatttaatataatttatataatatataattacatatataatttatataatatataattatataatataataataatatattattactattaatataattaataatattataattatatttaaattataaaattataaatttcataatttaaaattaaattaaattataaaaatttaaatgtaatttaaaatatataaaatatataatttaattatacattccatatactttatataatttaatcaactatataatttatatatttaatacataatttaaaattaaattataaaaatgaagaatatagttataattaaaatataataaatatattaattataatataattaataatattaattaatataattaatattaataatattaatagaaatatgtaataacatataatatataatatataattatataatataatatataattacatgtcatataattatgtataatataatatataattataagtaatataattatataaatatatagatattatatattaaattaaatataatatataatatataacatatgtatttaatatacaaatatgtcatatttatacgttaaatatatttacatattatatatgcatttatattaaaatatttaacatatatttaatatatattaatttatatttatatttaatttatattttcatttaattatatttagttttaatttaatcagtttaattatatttaatttatatttaatatttatttaatagacattaatttatatttaatataaatatttaacatatttaataaatgttaatttatatttaatataaatatttaatacatgttaatatacattaatatattaaatataaatatataaatatatattttacataagataattttttaatataaaatatttatataaaatttaataatatatatttatatatttaaatatatagtatatttaatatgtttatttgtataatatatttatacacagaaatatacttgtggtttacatatattgtaaaataggggattttattgttttaaattattattcatactggaactcaaacttcattgtctatcattttaaattattatttactgtgaattttactatcaagcagtgaccaacagtttcagcttaattcacaaactgtactggagtaaacagaagtattagtgtctgtaaaaccagtattcacatcccggtaccagcagatcaacagtcagctgtgttatatatcaggcaaaatacctatcctcaacagtatcagtttccttgtccaaaaaaagggactcaaaatatccacttttcctaggggcaatgagactttgtttataaaacacccagagcggtgcctggtatgtagtagatgcacattaaacatgaagtcaactctgctctctttccccaattgtccaacctgagctcctggcatcctggccctaatgctgtcttcctctagaattaaagaaccagaggtgccctagaaaggccttcaaaggtagcaagaaaattgctaacgcctgaaacaacagaggtctaagtgtatgtggaaaggagaagatagcttcctggcagaggaaagagtgtttttcggtgattcttgctctacttaccccatggcccaggttggacacgagcatcgggcccctccagtttgcccagcagtacctgcaactgtctttccgactgcccagtgccaatgtgtatgggctgggagagcatgtgcaccagcagtaccgccacaatatgacctggaagacttggcccatcttcacccgggacgctacccccaccgaggtgaggtggctttcctcctgagtatcgcccacagtaagggataccctccttcctttcctaaaagtagcctgcaggaatacatctattttactttgctcactttagatgtgttagtgttgaggaatatttgttcttgaggcctataaattcaggaatatagcaatattaaaaataaaaaaaattaaattagaaattttctagcaattcgaaatgcagcattttttaaacaaatttcacttttaatgggaaatacaatttcatgattatattagaacctagtatatacttctgccaaattactatgtcttggtttaataactgaggaaaggaaggcttcagtaggagccaagctcagtagaacttggtggactaaaaatgtctcttttgacagctttcatactgttctaggtgtttgctagtgaaagtgtgtttcagaaacgtcagcgttggcattacctgggaggttgttaaaaatgcagaatctcaggccatagcccagacccactggatccaaatatgcatttttgcaagatccccaggtgactcacattcatatgaaagtgggagaaagactgctctggattaatgcctctcagcttatctggagtgaaggactagtttcttaaaaaaaaaaaaaaaatctagcactggcaataattttgtaaaatacaattaaaatatattactgaaaaaatgaaataaaaaaactcaaagacataccaaaaaaacctaaattttcagttgaacagacataaaatattacccttttcaattgctataaaagaatttctaaactttgacttttggtttttgcacttgtcttgtggctgactgataacaaagggtttgaggaagtattgttccatggacaaagctttgagtcacataggtttgtagagcatgtcttgaagcctccattgtgctgatgatatttcttggatccatgcaagaactgcaagttgaagtatggtgcaagggagagagctgacattttgcaattcgtatttggcaggagatgaacaaagcaagtagcacattaacctgtagcccagctaccagcatcggatacaatggagggagtgaacttgctgagcagagcaaagacaaaaaagcaatagctaacgcatgtaataaatgtttggtcaaggaccctggcaaatattgaatactatgaatcgtactacgtttgactttctatagctgacattcctaaattgtatagtcacaaattagatgtaatgccttcctgtttttcttcctttcttttttcttgcctttctcccctgtttttttctttctttaaaatgtattttaaaaattttgtctgtatgctatccaagtgtgatgccattagttttcctggctataattttacatctagctgaggcttattgatcttctcaattttgcaaattatgttgattctttcttttccctctcctggtatttaccattatcagtattattgccttatgctttggctaagatgatgatactgtcacacagggaacttgtaaaacgttctccgtattctaatctcaacttcttttattcttacagcacttagagttacacacacacacacacacacacacacacacattatctcttcttaggtcagtgctcatcacagcttcgtcacagatttcaatattttttctttctctttctatcagttttaagcttttttttaaccacttaagtattatatggtaactacagaaacattagaaaatacaactaggtgtaaaaaattcaaaattactcataataccatcactttctgctaatattttggtatacatcatagcaaatatgtttacaaaataacttgattgagttataattcataggccaaaaaattcatctgttttaagtgtgcaattcaatgactttgagcacatatactgagttagacaagcatcgtcataatccagttctatagctttgacatcaccgcaataggatcccttctgccctttgagacttaaactccagagcttgcttcagccctaaccaattactaacctactttctgtccctatagatttgacttttctagatatttcatatcaatgaaatcatacaatatatggttgtttgtgtctgtttctttcccttagcataacactttcaaggtttatttatattgcagtgtgtatgattattttactgttgttgaatggaattcttttgtatagataataccatattttgtttattcattttccagttgataatatcattacaatgcctttttgatacaatgttaaactacatgaagtgttgaccaagtatatgttatagatggcttttgaatttattttagggtgaatgaaaactttctcaacacataacactatgacttttcttctgttttgctgatagggcatgattaatctgtatggagctcatacattcttcttgtgccttgaagatgccaggggctcctcttttggagtatttctgatgaacagtaatgccatgggtaggaagcatctttttatcttctgtaggtaggaatacgttttaggattctgcttttataaaaaattacttttatggtgagatcaactgttgaacagaaggcattttgaacctacaatacttttattgaaactggaacctgaaagtaggttaatctgtctacaaatccaggtgatacttgacattgttttcattgaaaaccacttcaggggtcttctttggtataatgtttcccctcatagtctgtagaaaataggatccactgatagacgcattccaaaaatatctgtagatttcaacgtgtaaattgtgctttctgtctgtaggcaacaaggctgtgttttgtaggctgtttctcacagcccacccacactttccccactccaaatcttccttctccagcttctggattaatggtactctcataagcatttttatttatttttaaatatttaattgtagtcaaactcatctaataaaatttttataacgttttttgagtgaagctactcgcaaaacccagaagcttgtatttttatgtggccaggttaaaatacaatttgttcttctttatcttaaaaaaaaaaaaacaaaactcaattcttcattggtgtcttacacattcaatactttgataaactccaacaacgatcctctgataaaaagacagtgtgattttcatccctttcaaaatgagactgagactcttttaggtggctcaactatttctactgcagagaagagtttacttccaaccataagattctaattaatctcattataattttttcagaggttacccttcagccagctcctgcgatcacttatcgcacgattggaggcattcttgacttttacgtattcctaggaaacactccagaacaagtggttcaggaatacttggaggtatgtctttgcatttagatagtcattatttactgctgttatctcatatactcattataaattaataaaagaaaaataaaaggtattagtaaactgtatggattataaatgctgggatagtgagtctttcatctattgtttatttattttgatgacctttattgggtgctttctgcattccaaagagacactgtgcaaggcttgagaaatgcaaaaagaagtcagacaccatcctgctttcaagtaactcatagtccattcatgtatcccacaaatcagcaaagcttattcattcaataagttaaaattcagtgaaaaggaactacctgaataaactttgctagctattcacatttgactcaaattatagaaaaggaagacgcttgaggttggctgcagtggctcatgcttgtaattccaccactttgggaggccaaggtgggcgaatcacttgaggtcaggaggttgagaccagcctggccaacatggcagagccctgtctctactaaaaatacaaaaattagctgggcatggtggcgtgtgcctgtaatctcactcctaatcccatccattcttattcctttaccctttgcacacaccactatctgaaattatattaggcatttatttatttcctctaagctctctgagggcaggagctatgtttgctctgtgccactatattccaagtgcccatattagcccttgccacactgtgaacaaatattcagaaaaacacttatagaataatgaatgtcaccagtttcccctaagatgacaccattactgaaacattttctgcaaattttattagtgtctgatctgatgttgggaatacatttatgtacttagtaaagaaggatgtgattgtggaatttcacaaattattctagcagattactcttagctctgacgttttcagctctgggaacttcacagaaaatgaaatggggctaatgttattctcaaagcctacacacttacttatcttttcagcttgttggacggccattcttccctccctattggagtcttgggttccagcttagtcgcagggactatggtggcatcaataaattgaaagaagttgtaagccgaaatcgtttagctgagataccatatgtaagtcgaaacttcttttaccatgcagttgacaccaattcccatttttattttttgcattaaattcaatgtattaggaaaaatgtagataaatcattagattgatagacaggcacacttgctggcagaaatttgcatgttaagttatgtatctgagcatgaaaagtatactgttaatgaagcctgatagaggtggctttgaattttagctttacctcttcatagctctgtgcaatgttgcgccagttaattaacatctctgagccttagtttccacctttatagaatgaggatgtaagacttactttggtgggctggtagtaaggaatgccttatactgtgcatgttgaagcatctagcactgatggtgaacatcatcaaagttagctattatgttattagagaaagcaacactggaggtgacatgaggaacaagagctgatgattataatgacttacagtaaatgagtttctcacggtgacctcatatactcctcccagatctgataaactctaattttgaagcttcatggttgcatcagtgtttatgatgttcaatgtccaccagtaagtcaagataattattaagtgtgtaatatttgatgatcttctccaggagatgcataacatgtggctaatgaatttatcaaaacaacttattgggggtagctctttgggattttgaaactttgatgtaagaatatagtgttggcccagtgcggtggctcatgcctgtaatctcagcactttgggaggctgaggcgggcagatcacttgaggtcaggagttcggactagcctggtcaacatggtgaaaccccgtctctattaaaaatacaaaaaaattacccaggtgtggtggcacatgcctgtaatcccagctacaaagcaggctgaggcaggagaatcacttgaacctggaggcagaggttgtagtgagctgagatcgcgccactacactccagcctgggtgacagagtgaggctctatctcaaaaaaaaaaaaaaaaaaaaagaatatgatgttaacatctgaaggaagactgaacatatggacatggctttggcctgctttcagggttcttcaatgccctctcagagtagtgatgagggcaggcagggggatcaatttttcctgtaaaaaaaaaaacagatggtcaatgtgttttggtgtcaaaggggaattgattgtgtttaattttacttctcccatatctattatctgcaaacatccaattccaggaagaattttcttccgcaaatagaatctttccctacatttgtttgtggaggacacgtgggtcctaaatgactgctcagtattagaacagttgatgccactttgggcaacaggccataagccacattttccttcaggcctgtaaggtcgagactcctactgtatgatacttgaggaacacttagaagaacacttcctttgtctttgaggaaggtggcagattggggaaaaaaagagcatctgaagccaaagagcctgtccccaaagccctcatcagcccccctacctcccagtgcatgtattttgggaaatgtcactgaactcccctacatttcaatttgctcactaagaataacacctgctccctaggctgatatgcaaacacaaggaaaaatgtgtgcatgagagtttagttgataaggctttatctttttgtcattgatctgtgttaatcattactctagcactttcgtagggcaaaagatcattttctcctcatatgatatattctggcttgatgcttgggttaagttagtacatggttataacattaataatatgattcattcaaacaaccatttaaagagcgtctgttttatgtcaagcatccaagctctcaagttaaagagatgaacaagatgcaattcctgctctcaagtccctcccaataccttatgacatgcacctgtcaggacaaggaggtaaaacagcaaccaaacagcaatcatgtctttcaaagatagcttattttctcctaagaagtagccaagccctggaaattccaggatcattagaaaatatggtttcattttcaatggtcaggaaccagagctgtaatactttccatcagcacagtgctgtttcctaggttctgattgaccagagctctctttcaggatgtccagtactctgacatagactacatggatggaaagaaggatttcactgttgatgaagtcgcttactctggtctcccagattttgtcaaggagttacatgacaatggacagaaatatcttattattatggtatgttcaaacacttgttaccttattttttcctttgtagtgcaaaaaatttatgaaaataatatttatatcgtatttctttattagaatcctggcatctccaaaaactctaactacgagccctataataatggaagcctaaagagagtgtggatcttggggagcaatggctttgctgttggggaggtaatttcttaagaaaatcaaagtaaattatgattgttttggggagttgtacttttggtacgaagatgagtgaaaggcaagttacaatattgttactgttttcatggctttagaggtttcttttattactattttaaaccagtagatataataatagaatgattaaaaacctgaagaatttaaaaagctagccttgatcctctaataccatagataattgagaagcaatatataactagaagaaaaatcagttacctaaagccctcccacctccaaatttctctttcccaagacaataaattcaactacaaaaatatagcaagatgctcatagattaatgtggaactgatctcagctaatatattttattttttttaagttttaatttttatttttttgagatggagtttcacttttgtcaccctggctgagtgtaatggcatgatcttgactcactgcaacctctgactcctgggttcaagtgattctcctacctcagcctcccgagtagctgggattacaggcacacgccaccatgcctgactaatttttgtatttttagtagagacggggtttctccatattggccaggttgatctcgaactcctgacctcaggtgatttgcctgcctcagcctcccaaactgctgggattacaggtgtgagccaccatgcctaacctatattttaaatttacacaagacttatagatagagcatagttttgattctgaggtagcagactcaggcagtggaataggctgagctggggcctatattcaggataattaaatttctgagagtactttaaatcaaatcacataggcaatttcaattatatgtagggtcagccctagatgattggattctgtaagatttactcaaattgttgcttcatctagagagttcacgtgactgcagatcttgttgctcctgagtagtttattttgcgaaactgtcttttcagggttatggatgatcccttaccaaaatctgcccacttaattcctttcattgactctttcgatgcttaattctatttacttttttttcattgattctaacttttcatgaagcagtaggaaagttttcttccttctgcacaccaagtctttgcttttactgtttcgttagaagctagtttctaaaatattagataagcccatatttatatactgcatttagagtccatagtcaaataaaaattattttgctcacctaaaattttatccacacttatgagtcatttcaatagtactcatatttgagtgatatataattaagaatttgcatataattacaaataatgaattagatagttgacttcattgaccaataaatggcatgaatcatttaatctaagatgttggcagagatagcagtagtggaggtgcatagtggtgtgtgttttttttttttttttttttttttgagatggagtcttgctctgttgcccaggctagagtgcagtggcacgatctcagctcactgcaacgatctcagctcactgcaacctctgcctcccaggttcaagcgattctcctgccttagcctcccaggtagctggaattacaggtgcctgccaccatgcctggctgatttttgtatttttagtagagacggaatttcactctctcggccagactggtctcgaactcctgacctcgtgatccacctgcctcagcctcccaaagtgttgggattacaggcgtgagccaccatgccagtccagtggtttgttttaaatgcacttagttgaataaaatttgctggctcgctctaggttgaatgttgctgtaggtgactgttttgtgacaccacctgtttcctggggtgcagagttaacatctaattgttagttgatgcccatcgcctaaaacaaagagccaggagctcaatccatttactgtgggtatttcaagctcccatcttgagttttgagaagtatccacatttcaaaatatgtattcattatgttcccggagtgtaaagttgttcctaaattacaatctataaatttatagggaaaatgagcaaaaattttttacaaaaactggtatccttttaattaagaattttcaaaaatttggctatggttatatctttgttgtggacaatctttaaagctattgtttgataggcatagacagaaaagggaggtagaatttaaaaaatgacctgagtaagaagcgcaaacttcattcaaccatttataaaatattgcttatatgccaaaaatatcaacacattatttataatcatacttattcaaagtagactttatgtgacctttaattaacaacacttgaaaaaagttcattctcttgaaaaataatatatagactttctagtattttaaacaatttgtctcccaactggcctgacataatgcagttgtactttttaaattttcttttgcacagaaaaggacttatggtggcttttcattgatctactctgttgcttttccttttattgttttttcctcttgttccttgtatgcattttattgtttagtttttgttggggtagtcacacattttatttctaaaatgacagcaaaatgaggctcctagtagaagaaatcactgtcggtcaaaatgaaaaaccttcaaccaagctgattgccactgccttcctctgtgtcctagggatatccgggaccgacagtctttcccgattataccaatccagtatgcactgagtggtggacagatcaggtcgctaaatttcatgatcatctggagtttgatggagtgtggattgtaagttattattcctgactcaaatttcctttggaaacagataacgccaaattttcagatgagttttgaccttgatgtcaaataaatgtcaataaaaaatagtttgctttatgtagtagtattcaaaattattttacttaaggctgagtctatatccagtgaattaggctcctaagagccttaggttcttatcctgcatctttcatcaactggttatttcattttgataaagtttttgctttctccattaactggttgtcagcttaaaaatactgttttattaaaacagtattataattgctactatttgtagcattgattcataaaaatttaaattaatcattagagaataatttaatgagggtctcgtatttttatggaagaacaataggaatttcttcaacaaatgttctctgagtgccaatgtgcaaggcattggagcagccatttgggaagcactctgatgaataagatgtgcaatgataaagaatatttgtttgttgccaagattagacatcacttatttttaattcatgtaagaaaatagatttgatcttaattatattctcttactgttcctcactcagaggaataaaggatagggacagttaacaatagaaatgttagtttatcttaggttcttaacaataacaataaatatttacaatttgtaaggcaaggatcaacctttgaaatggtatttctgaattagctgattgaaatcaatttataaaaagtaaaaatgtgcccactgtcatttagaagtggaacataccttaaaaatatataacctaatccaatgactcaattttataaaagatgaaacagagggtaagaaaaattagggagattatttaaaatccaaaaagcagttgataagggacccagatatcctggctcctagttcagtaagcgtttctcaacagctaaatgtagctcaatcgcattttacactttgtgtgttttgtgtctttgaaggaaatgaatgaagtatctagcttactccaagcttctaataaccagtgtgaatccaacaacttgaactttcctccttttcttcctagtaagttttcacctgtttgctatgacgtaggaataagccatgtttaaaacaccctcagtaatactcagtgtggtcgggagcaatttcacttcctagtccaaggggtctcctaaacatcctgagcactcctctgccgaagtctctgcagcagtgttgggtctctgattacccttttgctgtcataactccagggcaagcatgtgacaaagtctgagcctgcctacctcccctggctgcccttccagtctagaattcaaaatgctttcatcctgttcatttcccccaaatccctcaggtgtcaattttaaaatctatgagaatttcaggacacttcaggatacagactaccttaaactgaagtaaacctgtaatcttcttaactgttttctttattctttacttccttctttcctccttaccctcccttccttccttcttccctttttcctttttcttttttccctcccttcctccctctctctctgatcatttacaacagtttaaagcatcagtggtgccttcaaggtcccatttataggtcccatttctagtcaaggtcaattttccagtttctgattttgaaagaatatgtgtggaggtggcgggtggcagtggcagtatagaatacactatgctctggcaacatataaaccccaatatctcagtggattaacacaataatcgtttactttttgctcacatcatactctgatgagggatgggtgacttgaatccaagtggtgactcggatctatgtctggttctcccatctcctcagagacctttgtttctggcttcctgggtgagggagagagagggtggagaagattttatgcgcaggcctagaaggaaggtgtacccaattggcccacatttctttgctagaatctggtcatgtagcctcagcttaacctcaagggaaggtataatcttcttatatttccagaaagagaacactgacatgttgggcacccgaacagtcagtgtattctgatttgcccactttacttatacccctgagaccaaggtacagctgtttctttaactccttttggtcacttaaggagtaaataattttttggaggaagtctttacctcttgcaacatctactgtttgctttttcgacttactctttgttcttctctgctctgtctggattcccccattttttttccactctggattagtttatcatgttttttttttttttttttcttaatttctcaatcctctttttggccaaaactaaattttgtttttgatttttttttttccctatggaaaacctcaatcctatcactttctgcttgcttgtggtggacacggccacttttgctcatagccaggcagcccctcccctttccaggattgcatagtgcacattaattagcatgagaaagagcactgaagtggttgtgaatctcatgccacacaccaagctgtgcaagaaatagaattttcttcccatcttacatttcaacttaatttccagctccaaaccttgattctgttatactgcgtaggaaaaactcaacctcagtctttcctggtcccaccactttctggaattgtgcctcacactcaggtcctaggtatgggcaagactttgtgaaggaaggtagatacggccccagtgaagagttcacaaggagaggaagtggcagagaagactggccatttcaggcttgaggaagggaaaatgcaaacaataattctcagaggtaggatttgagtacttacacatcaaactgtcaaactacccaaatgtccaaatgtcacatcttattttttttttttttgagatgtagtctcgctctgtcacccagtctggagtgcagtggcacgatctcggctcattgccacctccgcctcccgggctcaagtgattctcctgcctcagcctcccaagtagctgggactgtaggcgcacaccaccatgcctggctaatttttgtaattttagtaaagacggggtttcaccatattggtcaggcttgtcttgagctcttgacctcaggtgatccacctgcctcggcctcccaaagtgctgggattacaggtatgagccactgtgcccagcctctatttttcttttaagtgtgactgtattataaaaaagaaaaagttccctttctctgccttcatacctatacattgtacactcaatttctcttgattaaatttatgtagataaacactatatgctttatacttaggctcagatccactgcgtttgctctgagcatgtttctcagttgcctcccctcaccaggattctttgtgagctcaagggaatgcagattaattttaataatccatctccttggaggtctcaatgttagccccaggcaggaaatagcatttaggatagaatttaaaatctggaatggatttggtcaggtggagattggtggggaaggtacagtaatcaggaagaaaatagttgggccgctaatttgttaaagatggttaatgaggaagtgcctcactaatgagtatttccctccaggagttctggatcacttactttttgcaagaactctctgcatggacacggagtttcatgggggccttcattatgacatccacagcttgtatggccactccatggcaagaaccacaaacttgtaaggacttggttttcaccctaattccagatatgtggaggtgggaggtggaggtggaggtttttcttctgttctatatgtaatatattgttcaaatattttttgcatttatagaaatagaaaaactgttcttacagagtatttaagagttcctctcatatacaccctggtttctgtacaggattatctttgattagcttatggctaaggagcttatttcaaggatactagcaggcaatactatgtaaggcatttagagtcctcagctagaagtcagctcttgcttggatccttttactgaatgcactaggattgcttgattttagcaaataaaaatacaggacaccaaattaaatttgtgtgggacattctcatactaaaaattacttgttgtttatttggaatttgaatttacctgtatttcctttatttatctggaaatgctacaccatatccttctatttccttcccaatgtcctgcttgtctacctcataattctcccttctgccctaagacacacacacatgcacacacacgtgcacacacaactatcaccatcaccaccaccattacctaacaccatcaccattgtcataaccacaccattactaccaccattattgccatcaccaccaccatcactaccactactatcaccatcaccaccaccacagttatcaccaccatcccccccaccaccacaatcactatcaccatcaccaccacccaccatgaccaccattcaccatcaccatcataaccgctaccactaccatcaccaccaccactaccatgaccaccaccaccatccctaccaccaccatcaccatcatcactatccccatcaccaccatgactatcaccatcacctttactgctgttgccaccaccacccattatgaaagtctaccaaggagacaaatgtgttctgcaaatcataacatcctttatatcttgtcatgtagattgtttacttgtgacttagtaaattgagaaataactcctcttctcactgtgtagtttcttctgtggaagatggtacaatacaatcattatacctaagagagcaagaaaatttggggccaggcttaagattttaatttgaatttgcagcacagatgcggaaactaaagagctgctgtggatcctccagtggcttaggaaagagcatctttgtctttctcggcttctttccccctgttttggtgtttctagagcactgttgtgctctacaagacagggagactttgatgggtttatggggcctgtctcagtccttttcttacttgacttctctttctccttggtactcaaggccataaccactcctttaaacttagctccttcagtccttaagatactgctctgctggcttggtgcggtggcttacgtctgtaatccaagcactttgggaggctgaggtgggcagatcacctgagttcaggagtttgagaccagcctggccatcatagtgaaacctcgtctttactaaaaatagaaaaattagtcgggtgtggtggcaggcgcacctgtaatcccagctattttggaggctgaggcaggaggatcgcttgaacccgggagacggaggttgcagtgagccgagatcacgctattgcactccagcctgggcaacaagagtgaaactccgtctcaaaaaaaaaataaaaaaagatacttctctgcctggtgcctctgctctctttccagctgttccctctcatctgtgtgcctggatcttttccatcagctctttcactattgatgattcttaggaatccatcctctggcctcttctctttacagtctatgccaacacataggtaatttataagtaatttatttcttttcatggttttcactgtaattaattctaatgattttaaaatctataattatacctgagatgtttacctaatttttagacacaaatatccaaaacaatcttctgacgttgtctacttggatgttttgttttttttttgagacggagtctcgctctgtcgcccaggctggagtgcagtggtgcgatctcggctcactgcaagctccgcctcctgggttcacgccattctcctgcctcagcctcccaagtagctgggactacaggcagctgccaccacgcccggctaattgtttgtattttttagtagagacggggtttcacagcgttagccaggatggtctccatctcctgacctcatgattcacccgccttggcctcccaaagtgctgggattacaggcgtgagccaccgcgcccggccttacttggatgttttgtagtacctcaaatagcattcaccttgctctgttacctgttttcacctaatcttcccactgtagctgatcatttttgaagctgttaaattcttttttttttttgagacagagtttcgctcttgttgcccaggctggagtgcaatggcgcgatctcagcacaatgaaacctccgcctcccgggttcaagcgattttcctgcctcaggctcctgagtagctaggattacaggcatgcgccaccacgcccagctaattttgtatttttagtagagacggggtttctccatgttggtcaggctagtctcaaactcccgacctctggtgatccgcccacctcggcttcccaaagtgctggaattgcaggcatgagccaccacgcctggctgaaactcttaaattctgtatcttggttggtagcaacagcatccctatatcccagactctcaagtgagaagcatgaagccatcttttatgccttttgtgccctcacatacgatcagtccttgatccttttgatgttacttttgaaacatttctgtaaccacctccattttccccccttaatacttcttaattaggttatcatcatccctcacacaaatcattacactaggcccagaactaatctccctgactttacccttatctcccagtaacctaccctctaccctttctacttgaagcatagtccaaggaacagctgcatcagcatcaccagaaaacattagcatcttggacctcaaccctgaacttagtaatcaaaacctgcattttatcaagatccctgggtgtattgaacgtatgttaaaatctagaaagcactgctgtacattcctgagaaagtgacctttctaaagcactgtttgctcatttctctccccagtgtaaaattatttgtgccttgctattttttatacagtgaaattcttagcataacctataaggtactttataatcgaaccctttcttacaatttttctctcacctttgcatcttcttgttcccaaatccaagtgctattcattcttccatgcctttcatgtgctatttgccgtgcacaagatggccttccttaccctgtccattttgcaaaatatgcttatctataaaacctcatctccaatctcaatgctgggaactttcctgacagttctaggaaaagattatttcccattttctgtgccacatttgttcatattccaatatgcttagtatgcaaaaaacatggtatcaaattttagatgctaattttctctctgctggactgtaagctttttgagggcaaagtcagcccatatccttagccttatcaatagagtgtgtactgaagacactttgttggataaatgcctggcctgagagagagaggaagggcaggacccagcacctaggggacctgatgacttcgaggcagagactgggtcggtgttattttccagcactattttgtcctcatgactttgcattacattagattatccagatgagagttcttgtccagaaaatgtaaaagtttgtattttggttaaaaaaagaaaacctctaggaagaatgacatatatttctgattcattatcttctctttgtcttttctctctcattctatttttcctgagaaataaactggataaataagactcaatttcctcatctctgaaatgagactcggattggtattcccataatctcctgttctgatatagttttattcttagatgcttctatctaagaatgagaaatgggaaacagagtgagtagtcagggtaagaaagagtaagaaagggttggaggaggggaagaaagtttcaaattacttttttgcccgtgactccatgtggtaaaagtgctataaatcaagaatgggttggttaatatattctaatagttatggttaatagttaaaaggtaattgtgattgagcaaatagtaggtgtctttctaatttctctggccaggcataatggcctacgctcccagaggacagtggagataagtggaacttggtctttgggcatgaggcagagtggatcaaaaaatggataacattttcattcaatgggatctggacatcagaagaactaaagtaattggtctgataaatatttggctcaaccttaaatggaagtatagtctggggacagtgggccaaccaggaataaaattatccccacctctaggctgaaagccgaaggagactagagtctttcagtgatcacaacctgattataaattggccagacctgggggatagaaaagagaaaactaaaagacagaaaatacaaagcctctgagtaagactgttcctttaagatgtttaaaaaaaaaaaaaaacccagcagttatctaatctgttttaccacagtaccagcctgcctctaaataaactggaaccacagatatcttcaaccctgttttggtttcactctgtgtaagctgaatgtgtttctttcatgattgattactgcagagtataataaacctgcagccagtggtaataaaagcaaagtgtcggccagtctacattaaagtagaagtggggataggagttgagtgagtcctctcctccaacctacccctatttttgacagtaaattgtcagaatgaagccctttactttcttaaagcagttttccgtttcaaaattttctcccttttgccattataagccattcagtatttatagactctccaaacttcccaggaaaatgaagtgaggaggccttggtgactgtgatagtgtattgaggaattgcctggtgcctggtgataaagacttgcagagagaggttttaggaaaagatacacttgtctcagaccatgtattagaaagcgggaaagaagagcttgcctgcgaagagctggcagaaactgtggcgtggctcaggtcttactgtcctttaattgtattattgttcaattttataattctaatggaagatgtgggctttttaccacaggggggaaaaaagaaaagaggagagtcatttcaataaaatgcctattcaaaaggtgtccagaataaaagctaggcaaacagcccacatccaaccataggtcaccccactgtatgttcatctgtgcccctgaagtaattaccattctgaattctgtgcttttaatttctttgcttttattcctttttttttttttttttgtctgagacagagccttgctctgtcgcccaggctggagtgcagtggcacgatcttggctcactgcaacctctgcctcttgggttcaaacgattctgctgcctcagtcttctgagtatgagtagctggagctacaggcgcacaccaccatgtccagctaacttctgtatttttagtagagatggggtttcaccatgttggccaggttggtctcgatctcctgacctcgtgatccacccgcctcagcctcccaaagtgctgggattataggcgtgagccaccgcgcccggcctgctttcatttctatattgttttacgtaacatgtaatattttatttataatacaatgaaaataatattttctatgttagttgtttttaactttatagaaagtatcagatgcgatcttttgagacttactcatttcaatgactcttattttgcatagattaaaatttgctaacattgagaattgctaagaataagtctgaagtttcagaggaagccagggataagttctgaagtttcagaggtgtaccagctggtgcatgaactctcctcttagtccagcagagggtgcagagctcccatcggagcaggtgctgtgctgtacaggattatgcatggcagaaattcatggaaccaaaggacattagaaaaaagatgggacaaggaactcaaatcatggttccaatatactgttgaccaaaaggaccagaccacaaccagatccaactagacagagaaaacaaaatcggggaacggaagcctagagaaattgctatgggggctagaatatagaggtttgtactgtcttatatgagatctgaaatcttaccccaaaatgggaaagaagctcttagatagtactaagtttatgacacctggtttatgacaccctcatgttgttttctcagtttggttagaaagtccattgctgctcttattgtaaggtgagtcctagacattcacagcccacctcacactccactggatgtattcctttccagagccctggagaccatcttcatgaataataggagcttcatcttatcccgttctacttttgctggatctggcaaatttgctgctcattggctgggggacaatgcggccacatgggatgacctccgatggtctatccccactatccttgagttcaacctgtttggcatccccatggtgagccttatttccaaccagggaactttaaccctttgtctgttgacattcttttaattagcagtcttagagattatctgaaaaaccaaggatcatgttccaaggtgatatgtattggaaagatcaatttttatgtgttacgtgagctgccttctgaagatagaatggtagtactttatcactgagttgtcatccatggaatctctgaagataggaaggagacagcatgaataaaatgtattagtatcacaggaaaattccatcaagagagcattagtaaataagaaagtatgaaattgggaactgaatattaaggaacagcctcaacacaaggaccattgtttgcactatcagtaagtccgtgatggattctatcttgtttctctcctttggctgggagtgtgccctgtgactctgggatctccttaagcatgggatgatgtgacaaagaggttctcttttcccttatcatataaatcttcactacatgctttcgcctctcattgaccacagtgcttgtatgtgtgctaattctccaggtaggtgccaacatctgtggttataacaacaatgtcacagaggagctctgcagaaggtggatgcagcttggagcattttatccactaccaaggaatcacaatgggcctgggttcagggtaaggtcaccaaaagaagtgatggaaactttttggattagctaatctactggctcttaaaggggatttgaggaaaatagtactacaggttggcactaactgcagcagaaggataaaaaagtcttgtatcatagccttaaaaagcagggtatcaatcaaggtgagggtgcattggaagggatatgtatatactgaaagattttattcttggaaactcaccaacaaagtgagaagatttgttaaagtttctatggtgctgccatgacttctgttctatcctatataggataggacaattggaatttgttggtattttatttcagttaatacaagggaaatccctcataggtatggaggaacaaggagaaagaatttaaagaggcttaggccagtgatctcaacatttctttccccttgttacaacattctacctttctatgaagagtttggaggacttgccaactacttctcatgactcattccacctttaggctcgtctacccaaaatagtattttcgatgggcaagtacatggaagtgggttcaaagtcccccctaaggaggtgtttatgatggtagcagaagcaagtagggtgagatgtcctttcttttaataaagtaatcttaagttgaaatatttccaattgagtggtttagctcttaataggttcattagaataacttcctaatgataattttagctccaattcttgactttgtctttaacccaggaaggattaacagtcaaaccttcaaagtattttatccctgggcttttctggccacttgtgatctagagagagatgaactatttctaaatgtcttaagcaggtggctgggagcaggtgggtgggtgctcttcatgaagctgtgtcctggaagacttacataggtaagaacactcagataacccaggaagctaggtttaagcacgtatgtccttttgattaaactagctctattcaataaaattataaggagagccacatatgtcagtttaaatttgaaaagtacaaaaaggctgggcacggtggctcacacctgtaatcccagcactttgggaggccaaggtgggaggatcacctgaggtccggagtttgagaccagcctgaccaacatggagaaactctatctctactaaaaatacaaaattagctgggtgtggtggcgcatgcctgtaatcccagctacttgggaggctgaggcaggagaatctcttgaaccggggaggcagaggttgtggtgtgctgggatcgcgccattgcacttcagcctgggcaacgagagcaaaattccgtctcaaaacaaaacaaaaaaaaaaacaaagtacaaagaaacagggacattgttttaaaaatactttatatagctcaatgtgtatctatatgtgtgtgtgtgtctgtatattacatagcattatcatttcaacctgtgtttaatacaaaatattattaatgagctattttatatccttttcattctactaggtcttcaaaatttggtatgcattttacacttgtagcatatcgcaatttgtatgctaagattttttgtatgcagttgaagtaaaatgcaattctaccaaagcaataaagttggtttaatggaaaaaaaatttacgttgattcagttttaagatttatatttaaagtaactatcatcaaataaaatggaaagtttacttcctcagtctcaataaacatagttcaagtgttcaatagcttcatgtggttcatggccaccatagtggacagcacagctctgggcttttgtcagttgacaaccagggtgatggaggctgtggagtgttactctctttaatgtttggcctcagagttttcatgagccctacactgggtgcatagagtggtctcatggagtcattctatttagagggggagaaatgggcctcttagggagcaaaagaaaaaaaagttcaggtaactttatccaaaactcagtctcagtaacgcagtataggatgacaagtcaaaagatgacgtgtatgtctttcacatcttccaaattatatggaaaatgaacaaaatgaatgccgaccattgacggaaaattttcatctctgggtccatggaaaattagatttttcttctaatgggttatttttttactcttggataaaatctgctaaaaaccatcgtcataatttatttgcacaatgtatgtcaaagaacaaatagaggtcactaatctttgggatagggaaaataaaacaaatgttgatggtggaaacattacagataaaactggacaaaaaatgttaaaattaaaattcatacaagcacatggaaaggaaatgatggattacagaccatggtggcaggcaatgtggcttataaggcaatggatttttttttagtagtagtacaacttatattatttcccaaataaaatatgagaaacctcaatatgtaaaataaattggagcaaccctggagggagcaagtcccactttatctccatggcaacccctgtgggacttccatttcactctggggctgctacaaactgcctcagaagacagacaccaatttttttttttttttttgagacagagtctcattctgttgccagtttggagtgcagtggcacgatctcagctcactgcaacctccaactccctggttcaagcaattctcctgcctcagcctcccgagtagctggaattacaggcacgtgccaccacacccagctaatttttgtatttttagtagagacaggatttcaccatgttggccaggatggtctccatctcctgacctcgtgatctgcctggctcggcctcccaaagtgctaggattacaggtgtgagccattgcgcctggccgatagacaccaaatttaaactctgccacttgtttgcaattctacattgggaaagtcatataatccttgatattgttttctcatgtataaaatgaaggagtaggattagtatcttttcagttctagaaatgctttgatattctccaagttggaggaagtggctagtttcatctgggaaacttattgtaagagaacttctgaactatgatggaaagaaatattcagccattccttccattttctcctaggaccaggatcccgctgcctttggtgttgattccctgctgctgaaatcctccagacattatctgaacatccgctacaccttgctgccctatctctatacccttttctaccatgctcacacccggggagagacggtagcaaggccccttgtacatgagtgagtttcctgattctcaaagactccctttctgattgtagtttcacttgactttgtttgtggtagcaaggttagttaggatcttgttgttacataatgtgccattgtcctgtattagagacttcacctgccttcactgtgctacctctttactaggttctaccaggactcagccacgtgggatgtgcatgagcagttcttatggggacctggactcctcatcacgcctgttttatatgaagtatgtttatcatctaaacaatgaaagggggtattgcacttgtcctcatggttctatagctggataagttggttcctatctatgactgcatttatatcaaaatatgaatataaatgagagagctcatgaaagtttagaaattttttaaaaagtagtaaatcttggtcccattgccccaccaaacaaaacaattttcatgttgtaaaattgccttaaaattaaagcctaagtccttaggcatatggctgcagcattgacaatggctttaaatactttggggtgtatgtgctgaacatctgtctatagtttcctttgtccagagcgggtgtgctcttggattgggttaggctgggctgcgaagagagaatacctgtggagaagaaaagggagggagagaggagtgctgggcaaagggaaggcgatgctctgaagtccaactatgaaggaccatgtgtatcctattaagtgtgattgggagcaggggtaagtggcaaagtgtgggacaaggatcaggaaggattatgctgatctgcttgtaaacatgaaatattgccagtgtagccatgtcaaaggccctttgagctgttgttatagccacactatctgatgacaggtcctgctaaccaaccagtggccctgctgggaggctttcctggggcctggctggctcactgtcctcccaactgtcaaattatgtgactaactcagtgaatggactttctctgcttctcttagaaagtgcagcagcattgagcaaaacaaatcatttttagctacattctgctttgggtaaattgctcaacctttatgtgtctgtgttttcctttgtagaatgggatgatctcaaccatctctcaggattgttcagataggcacatgtaatgatgcctggaggtgttttgtaaactgtagagaggggtatgctaatgctactcattattgttgtttacctagggtgtggacgaagtgaaagcatacatacctgatgccacctggtatgactatgagacagtaagtaaggcagccctggttggctcacagacctgcctctagcagagggcaattctaaagcagcagtcttgggagcttgccatagaataatagtacaagatttatagttagttgattgtggtcctttttctgtgagaaaggcatcttagttggttcaggatggtgcaacaaaacaccttacactgggtaatttataaacaacacaaatttattgctcacggttttggaggctggcaagtccaagatcaaggtgctggcagattccgtgtctggtgaaggccctctctgcttcactgatggcacctccttgctcctccctcatgacttaatcacctcacaaaagtctccccaccccttaatactatcactctgggtattaagtttcaacatataaattttgagggtacaccagcattcagaccatagcagaaggcctttccaaatgtacaatgaaataatttgaataactggagtaggtttatggaaattcattatatcaacctggctattgtgtagctatcaagactgggctttgtcatttggctgtggtagcctagcaattgaagcccaggtgtggaatgacagcttgatgtaatgtaaataaataaaggggattggagtgtcagctctgccctctactacccatatgctttcagcaagtcacttcactttggggttctctgtttgtctcttctttaaaatatgtcaactgaatgagatgatacctaaggcccctcctagctgaaacagcttattacctgatctatcttttgttgttgttgctgattagggagtggccatctcatggaggaaacagttggtgaatatgcttctcccaggtgacaagataggacttcatctgcgagggggctacatatttcccactcagaagccaaacacaaccacagaagccaggtaagctccttactcttctaaggtatgactattctggtgctctaatggagcagggcattatgagaaagacaaatagggatttttgtggatgagccaagggataagtcacccatcagtaatcttcccccactcctttcaaaattgatccaaaattggcatcttagtccctatttagtagatggtagtctgctaaggacatctgcagagtgtttcactttgggattgaatcagattataggactagtcaaagtaatcactgaggaggatttccctatggccagaaattgtccttaggtatattccctaccgtgtgagagaatttgagttaaataggagataaaggttatcacgtggaagccaacaccgtttgggggtcaagagctcagattctacagaacctgggttcaagccttggtttgggctacatactagatgtgtttaccttgggtaacttacttctctgtgcttctgcttattattggtaaactggagatgatgatagtttaactttgtagagttattatgagggttaaatgaattaatataaatgataatgtgtgcgggacacttagaagagtgcctggcacatggtaaacacctaatgaggctaattgttggtattatgtattgcaacccaaacagttgcctgtaggaactgcctctgtccacccttccctttatgtccactcactatcaacccctgctgcctgcccacacccagctcccatgtgtccacccaatatcaacatctactcagtttctggtatagactcttggattatctgtccctgggggatgaaggtggctggtttcacatagttccatctcatctacattctctgaaactgggaagtactcttttacagccggaggaattccctgggactcatcatcgccttggactataagagagaagcaaagggggagctgtactgggatgacggtgtatctaaaggtagactttctcaaggcaccatccctgtggatcactgtggttctccctgaaaattagtcatcataggctgcccaatatggcactaaccctattagcactgtcgtttacatctgtagctgagaatcaacgggttaaaatccattctgaaaattccattagccaggcacaatgcattaaaatagacttcaaatgcacaaattatgtgttactgactctaccaaagcaactggcattatttcatttagcttaattattctcttccttggatattaattattaataacagataatacactttttaatagctttggaaaatactgctttggtttgtggaagaaatatctaatttgtattgtatgtcttttcactgtaaggtttccatgtaaacacctcacatgaacttatgtgattatataaaaatcctgtcctacatggaattagtatgtattgtgtaggccttgaggaactcatgatccagcaggatagatacaatgcacacatagataaatacaatgcaaatcaaaatgttttacatgccagcgaaatggtaccacagactgacatgtgaatttagagaaaatggtccaggaaatatttgcagaagtttgaaaaaaatgcacagaactcagatgagcagaactagatggttggtaaaggaattccagatgaaatgaagagaagagcaggactccctggctgattggcttcccatagtaaccggtactcctctttcttttttagatgctgtgactgaaaagaagtatattctatatgatttctctgttacctctgtaagtattttgtttgaggaacacacagcatatgttccttgctgggaaggctctttgagtttttagtttaatatagacacatggttatgtgcagcagagacagggttttactgtcatgattccaaaaaggaatcaaatgaacatgaaagtgtttaatgtgtgtcaggcttataagctgctacaaaaccaatatgagttctgtgcagaactttttttttcctggaaaaaaaaacattacctttgagttttatgtgatgggtgctggcttccaagatgtgccttttttgaggtttgcaagtgtatatgaggtgtgagtgggttagtgagtggtatggcacatttttaaggttcttccataatggctgtcctttgtagcacgtaaaacttggcctttggcacgggtataaagtagcggcttttaaaggctggaagatacagaacatcacttgcctcatatctatttcccaaggggactgagagaagaaaaagcagcaaggccagcagaaaatgagggaattctgacttgattttcttagaagcctgatcatatatgggcagaactttcttttgaggcggtctctctctctttcttttttctcctttcttttaaatgtgtatatatgtatctgtacctatacatataaaaatggatctactttaagatatagaatatatataatttatatataaggtataaaaaatatatatcttaaagtaactcttttattttgagataattaaagatccccatgcaattgtaagaactagcacagagttcccatatacccctttgcccagtttctcctatggtaacatcttataaacctatagcacaatttcacaagcagaatgccggcattgatgctatcgagatacagaatatttcattagcacaaagatctttcctgctgccctttaatagcatgtccacttgcttcttccccaatccctcctcagcccctggcaaccaatcatctgttcgccatttctataattttgtcctttcaacagtgttctgtaaagagaactaaactgcttgcaacctttgggattggctttttcattcagcatagttccctcaaaacccatccaagttgtgtgtgacaacagcttgctccttttcattgctgagtggtgttccaagttatggaaccttttaaaaatcactcacttgattaatagtatctgggatggctccagtcatgagctgttacaaataaattaaaattgctactaacactcatgtataggttttggtgtgaacataagtttgtttttttgttttgttttgctttgagagggagtctcactgtgttgcccaggctggagtgcaagggcacgatctcagcccactgcaacctccgcctcctgcgttcaagagattctcttacctgagcctcctgagtagctgggattacaggcatgcaccaccatgcccggctaatttttgtatttttagtacagatgaggtttcaccgtgttggtcaggctggtctcgaactcctgacctcatgatccgcccgcctcaccttcccaaagtgctggggttacaggcgtgagccaccgtgcctggccataagtttttatttctctttaataagtgcctaagagtgcagttgctgggtcttatggtaatgcatgtttagttttataataatcttccaaactgttttccagaatggctgtaccattttcacttccaccagcaacatatgagtgatctaatttctttgcatcatggccagcatctgatgttgtcactatttttttaggcttttctgattggtgtgtagttacagctcattgtgtttttaatttgtatttctctgatggctaatgatgtttaacatcttttcatatgtctatttaccatctatatatttacatttttaattttgatgaatctaatttatcattattttccttatagattgtgctttttgatgtcaagcttaagatctcttcgccaagtcctagattctgaatattatctcccatttaaaaaaatatagtcttaccttttacatttaagtcgtgatctattttgagttaatttttatataatatgtaagatttaggttggggttcaacctttgacctgtgtatgtccagttgccccagcacctttgttgaaaaaaatctgtctttgtaaaaaatcatttgggcatatatgtatgcgacttctaattttttaagttatcaaactgctacttttttcttcagtcttaatttctaccttcttctttgtcatagctcaactgtgtcacctttgttccctaaataagttatttaattttctgtgtttcagtctcctcatctgaaaaacgagggtaattatagcttcaacctcatagcctgccgtgaaaactgaatgaagtaatacatgtcaaatgcttagcacagtgcctgtcacataatacacactcagattattcttagctcttatcatcattattagtaaaataaaaggaagaaaattacttgggcccttttggtgtatatgtgtatgtctttatctttgtgtgccaatgaggctcttatctttttgtttactgtgtgagtacctatctcgtctgcttgaaaattctacagtgtcagggacgtattttccgattaatagaatcagtaaagaaccagtgaacaaaagcaaagatgaaatattacttaaaaatttaagattgataagagtctgagtgaacgagttccctagggatgatgacctagcaacatttgaaactgcagagaaaaggaaacagcttggatcacagaaattgagacattgactggtatttggggataataagggtctgaagtacctggtttccaatctgacttttttttcccctcccagaaccatctacaagcaaagattataaataataattatatggacactgacaacctcatgttcacagatatcacaatcttgggaatggacaaacagccagctaattttatcgtcctactgaataatgttgccacctccagtccaagcgttgtctacaatgcttccacaaaggtaagagatccttccattctgcagggccctttccagaggccttggctctgacagccagccctactttgctcttttaactgtgggcagtcagacacaactgacttgctgggaggtccaacacatcacagaaaggatgcaggagaaacgtgtgcatgctaaagaaagacctctctgctttgtttgtatcagggctctgaagaaaatagcgggagtcggaaccccgagagaaggaagttcttctctgggcgcagttaaaatgagacactctgatcccagctgtgacatagtgaatagattgtgcaatgggtatttacacattggtcctctcattgaagggagaatctctttgagaaacagttgatatttgtccttaccgttttaggctattttcataccattaataaaatgtgagtggagtaacgcaaggagaaatccagttttgctcttactgaatgattcccttacactgttagttgaatatttcaagttctgggaaatttgttatttcttagatcagcccccttccatgttgacaagacctatagcatagaataagagtttgatttctagagttaggcagaatggggctccaatctcagctcttagggtattaggtgtctctgtatcttagttttctgttctgtaaaatggagatagtcaaaacattcacagcatggaactgctgtctaggattaatggagatcatgcttataaagtggttatcacagtgcttggcttgtatgaatgctccataaactttagctattgttgttattactacttttattaaattggtaagcatcacacccagaggacagtaagcctaaccatgacagtcctgcctgtgatctgcactcattagcatgatgaaaactcttcccatccaacacttccacaatgactccatgaagtgagaaaacccaggaatcagccaagttctgaatatctcatggcaaaatggttttggaggaaggaatagatgcccttgtcctgacttccagacttccagccaagaactctttctgggtggctttccctcccttcctttgtcactgtgactgtctctttccccaggtggtaaccatcactgatctccaaggactggtactgggacaagaattctctattaggtggaatcttcctgtcagtgacctggagaagttcaactgctaccctgatgatccaacagcctctgaggagagttgtaggcagcgggggtgtctttgggaggtaaatgaccagaaacagattacctcattgattaggaagtaattaggcacctagaaaacacttttcaaatgtctgtggcttgaagaaaaccaggaccctgtgcaacacgccttttgccaactctacatgataggtcatcagtattttcctcagacatcccaaatcagaagaaacttattgccattctcattgccactccaaccatatcattaaaaacccaattttaaacataataatgtacattgggtatgcattatgcattgtctattttaaccaatcttgttttgtctgttggagaacacaagcaggaagggtaaggtcaggctgttcctgtctatttgaacaacagagaaaatggaaactaggaagccaagtgatttcctctagattacatgggaggcaataagaacactgggagtagaaccctgcctggaggctcctgtctccctatcaaacttcctggtgctctgtcacggttcactcattatagaaggtcagtgtgtgtgtttaaaaaaatggatgtgttcatttgctagggttaccataacagagtaccacaaactgagtggcatagaatgacaggaatttattccttcaaaattctggagtctagaagtgggatcatggtgtcagtggagctggttccttctgaggaccttgagggtatttctttgcttgtagatgcatcatcccactctctgtcttcatagtcacatgtgtacatgtctatctctgtgtccaaattttccttattaataaggataccagtaataccggatcaaggcctatcccaatgacctcatcttaatttgttcattgcagaaaccctacttccaaatagtcacatttacaggtatcaggggttaggacttaacatcttttttaggggacacaattcaacccataaccatggacatggtattagagacttagtctgtgttaaccaacttcttcagtaatgagagccttagtgttgtatcagaggctgagcaagactttctcctgttattccaggacacatctactcctggagtgcccacctgttactatgacaccatccctaattatgttgctagtgatattcagtacctgaacaccagcatcactgcagacctttccctcccgatggcccctgagtcagctgctgctgccgcctctgattctctctctgcaaagatcagcttcctccacctgaaagtgatctatcacacagcaaccatgctgcaggtcaaggtaaggcccatgttgcagattctggttctcaagatggagtttttaatttacagtgctgtatggatagaagtcattgaaacaattaaaacattttttttcttttcaagacaggatctcccactgacacccaggctggaatgcaggggcacaatctcaggtcactgtaacttccacctccctggctcaagccatcttcccacctcagcctcccaagtagccaggactataggtgtgctccgacacacctggctaatttttgtattttttgtagagacggggttttgccttgtttcccaggcggtctcaaatgtctaacctcaagcaatccacctccctctgcctcccaaagtgctggggttacaggcatgagccactgtgcctcgctgaaacagcttttcatccaaatccctcatgttatggatgagggagctaaggcctgtagagaggtaaaggtcggaaagtagacggtaaagccaggatgtggccttagatctatgaggaccatgaattccctataatgatgagtattctaggtcataaacatcatcaaagaatcatcatttagccctgagaaaaatggatctgctttgtggcaaactcacatgagaggcattaacttaattctaatattagaattattttctctagcagtagttctcaaactgcagcatgcatcagaatcaccttcagatcattttaaaacccagatttcttgccctcacccctagggtttccaattcagtagacctgggctggggcctagcctgaggatttgcatttctttctttttttttttttttgagacagagttttgctcttgttgcccaggctggagtgtagtggtgcgatcttggctcactggaacctctgcctcccgagttcaagcgattctcctgcatcagcctcccaagtaactgggattacaggcacccgcctccacgcccagctaattttttgtattttagtagagataggatttcaccatgttggccaggctggtctcgaactcctgacctcaggtaatccacccaccttggcctcccaaaatgctgggattacaggcgtgagccaccacgcccggcctcgagaatctgcatttctaacaagctcccaggtaaggctgatgctgcaggtcaagagaccaaactttgagatctaccgctatgcacatttaaaaaatacgtctactggaaacataatgtgagccacacatatcttccagtagatgcatttttaaatgtatattttaaaagggaaattaattttaataatattttaaccaatgcgctaaaatattatcatttcaccttgaaatcaaaatttaatggagttactttgccatcttctaattattctaagtcttcaaaatctggtgtatattttgcatttctagtgaatctcaattcagactagcccatgtcaggcactcaaaggccatgtgtggcttgtggacagcaccttggacagctcagctgtagccattgctttccacattttaatgtatcatgaatcactggggcagcttgtgaaaatataagttctaattcagaaaatctgggttggggcctgaggttctgcgttcctaacaagctcccaggcaatgctgctgctttgggtctaagaaacataatttccaagcaggactttagaaaaccttcacctggcaaggtgtggtggctcacacctgtaatcccaacactatgggaggccgaggcaggtgaggtcaggagatcaaaaccatcctggccaacatggtaaaaccccgtccctactaaaatacaaaaaattagccaggcctggtggtgcgcacctgtagttctagctactcaggaggctgaagcatgggaatcacttgaacctgggtggtggagatcgcagtaagccgagatcgcaccactgcactccgagctggcgacagagtgagaatccatctaaaaataaaaataaaaaaaaagaaagaagaaaaccttcacctaagcacaaatttgggactaataatatgacaaagaggatagtcactcataatgttgtaactccttgtccttccataacatttttcactccttttattcttcccacacttcagtcctgttacataagtaggaacaaggggtggatacagaagagaaactttaggaatgggaaagctgtacaacatctggaagctcaaacagtgaggagatctcagagtccatatgaaaactcaattccctaattcctaacatgcatgcacacacacacacacaaatttacacatttctatgcacatacatgtctgcatgccacacacttacaaacatatacacacacattctatttatgaaattctatccccttctatcacagattctttagaagaagagccctccttggctttgaatgggttttactgaggcaatttttgaacttcagcatctgtatggggcacagtgggcaggcaggcctcacatccattcgcttggggatgtttgatgcctactgatatggtgcaaactggtcaaaaacatggaaactgaattatatggggtggcatgaggggttttaggtctgagaccctaacagaaagttttcttctctcttcttgccagatctatgaccccactaataaaaggtatgaggttccagtaccactgaacacccctccccaaccagttggtgaccctgaaaaccgtctgtatgatgtcaggattcagaacaatccttttggaatccagattcaacgcaaaaactccagcactgtgatgtaagcactatttatttgattctaattagagtagttctagatttaattacagcagttacaattaattcaagtgaaatattaatctcagagactctatggaaataggtgtgcatttgttagagtatatctatttttcccatgctttaatggataatttgtttttggttagtcattaacaaaaataatcaatcaaagtttaaagaaatgaagtattgtttgatttcagagaaagaaaaatacatgttctacttactgttcttaagtagaacagaaaactctaataagtacagcagataacctaagatacaaatgagttccatattatgtctcattaagaaataataagaggcaggagagaggggcaaaggttaaaaaggagaaagaaatagcttcttgtaacgtttgcttctgtggacacagaagccttcaagccttttcacaatgttaagcataaaaggaattgtcatctcccatctcttgtcctgctgctgaatagaatgaagtgaaagtctggattttgcctggggtgaggttccctatcccagtagaagctgtcacctgtgtgtgcacctttgccttcctgtgtatgtcttctctcttgggctgtgtgagtgatttcctctctgttgccctctttggtaagaagtcctttggccaactcaagagaagttgttctaagagtttcatgcttttctattggaaagtttgcttaaactctatttgtttatttatatatttactcaagctgatattccaggcactgagaacttgaaataaatagaagaatgagttatggcccttgcccacaaggacccagaaaaggagctctcagtctgacaaaccacagaacagaaatctaacatggaactttggtcctgagtcagggccattgttatgacctgggtcatgtcacagtatttgaacctggatctaaatgtgcaataattaaggaggctttggaatcaactagacattccaaacacgttccaagtagctctggccagtggtctccagctcagcgtgatctgcttttgtgttgcagttgggattctcaactccctggcttcatcttcaatgacatgtttctctccatttctacgcgtctgccgtcccagtacatctatggctttggggaaactgagcacacgactttcagaagaaacatgaactggaacacatggggaatgtttgctcatgatgagccacctgcggtagggacaaaggaataagtttagcaatcagtttctctttatgtaaatctcttttaatccttatgcttatatatgataccttgctcatcaacctcatcttatattgataaattccgctctcagttgtaatagagcacgtgtcacattcttttgtccctaaaaggcatatatatatatatatatatatatatatatatatatatatatatatatatccacaactgacagagggaaatatgtatatatttccctctgtcagttatggattttatttatctcacaaacttttagttaatatattctacttgtcaggcacattgctaagtgcttatctgtacatttaataagacactgtctttgctctccagagacttataggctagtgagagaaatagacgcagaaattgtgatagcacagtggaatcactgaattatgtaataatacataattgaattatataataataaatgaggaaggcatgaagtggggaagacacagcttttaacttggagtagaagggagagtcaatgaaggcccaacaaaggacatgacattgagctgaatctttaatgatgagtaagagtttgctgtttgggttatggtatgaaaacaatatcttgcattttctttttgtttattaccctcgtgactcccagtacaagaagaattcctatggtgtccacccttactacatggcactggaggaggatggtagtgcccatggagtgctcctgctaaatagcaatgccatgggtaaggcataggcacagctcccatgcaccaccagaaacagctgtgaccgctctattttgacctggtatcaatagaaatagagacattcagggggcaagggaaatggaacaaataaactgactttccatttattcacctatttattcaagatttattaagaactctggatcaggtgttaggcatggaattttgatcagttatggctcctactctggcatagcctattttactgtgacactttggctcccattcacagagttataaaagttgttgagattgcatattacatttggggtacctgcaaatacacctctgattctaatggatgagagaagactttctagagaaggcatgtatcaaagacagagtatgaagaaagcaaatcttagagcaggttttctatctgggcaatttacaactccaaggatgtgcctcatgtgtgttgtttttcttacagatgtgacattacagcccactcctgctctgacataccgcaccacaggagggattttggacttctacattgttttggggccaacccctgaacttgtaactcagcaatacacagaggttagaagccattctgtccatcaatatattgtcaaatatttattggctattaccacattattagcactgagatagggcagttttttcttttgactcttgagtgtcactactagattattactgcctttgctgaaatcatattttagtattatggttctataaagccatattaatatcccatgtgtccctcacttgctaaacagcctaagaattgctaatcagtaataaccggcaaattctcaggtttcctagaatgaaaactctggaatacagaaaaacttcaattacgtttctatcattttgcatgtctgtagttgctccacatttgttggactttcttatctttcttgggtgaggcctcttatacagtacttagcagaaacactcaagttgattcaagtataagtcaatcaccttgtcttccctaagaaatctttctggatgcatttttctttttattctagttgattggtcggccagcaatgattccatactgggccttgggattccatctgagtcgctatggataccagaatgatgctgaaatctccagtttgtatgatgcaatggtggcagcccagattccctatgtatgaaaccctcactcagcccaaggtgtaattagttacaggaatttgtggctaattttatattagaagtgctatgatgttcttatcaaagataacttgatacattcaggctgaattttttttctttgtatatactataatactatgtacttattaaacagaaattagaaaataggaaaattacaagatgaaaaaatccacaaatctaccttaccaaagtaatcaacgttaataatttgctggtttattcttttccaaattttggcttatgcacaagtctctgttttaccaaacaagtttcacctagggtcatatggcaatgcaggggactatccctttgggctaaaaagaagcaagttctttttttcaactaaatattaatcactttagttattattcaacaatcatggtttgagtaagtttcatgtgcagaaacctgggttggtactgcatagagagggtagacattcaagaaagctatagaataatgtagttcttgtatgttggtgtaaggaaggggtccagtttccattctacatatggctagccagttttccctgcaccatttattgaataagggagtcctttccccattgcttgtttttgtcaggtttgtagaagatcagatagttgtaggtgtatggtcttgtttctgggttctctattatttgccattgatttatgtgtctgttcttgtaccagtaccatgctgttttgattactgtagccctgtagcatagtttaaagggggatcacctgatgcctccagctttgttctttttgcttaggattgcgttggctattcgggctcatttttggttacatatatgaattttaaaatagttttctctagtttgtgaagaatgtcaatggtagattaatgggaataacattgaatctataaattgctctgggcagtatggtcattttaatgatactgattcttcctatctatgagcatgtttttccatttgtttgtatcatctctgatttctttgaacagtggtttgtagttctccttgtagagatctttcacctccctggttagctgtattcctaggtattttatttgtggcaattatgaatgggagttcatttgtggtttggctctaggcttgactgttggtggtgcatagaaatgctagagatttttgtacattgattttgtatcctgagactttgctgaagttgcttatcaggttaagaaacttttgggttgagatgatggagttttctagatataggatcttgtctatatgacaagatctagtatctagatacaggattatgtcatctgcgaatatgaatagtttgacttcctcttttcctatctaaatgccctttatttctctctctctctcttttttttttttttttttgagttggagtctccctctgctgcccaggctggagtgccatggagcaatctcggctcactgcaacctctgcctcctgggttcaagtgattctcctgcctcagcctcctcagtagctaggactacaggtgtgggccaccaagcttggctaattttttaaatatttttagtagggacggggtttcactgtattggccaggctggtcttgaactcctgatctcaggtgatccacctgcctcggcctcccgaagtgctgagattacaggcgtgagccaccgtgcctagcccgtttatttatttctcttgcctgattgccctggccagaacttccaatactacattgaataggagtggtgagagaggacatccttgtcttgtgctggttttcaaggggaatgctttcagcttttgctcattcagtatgatattggctgtgggtttgtcatctatggctcttattattgtgagatatgttcctttagtacctagtttattgagagtttttaaaaatcagccagatttactgtagaaaaaaaccccagatatacaatcctgtttgtttcctaggaaagtcccagtttctacccttgaacatttcaattagaactttgtttgatagactgagtttgagatttgaagagtgggaaagacatgaattgaggaaaggaaaggggatagagttccaattggggaaacagaaggagaaggagtgggcacaggtgaactgcatgcaggcatcagaaagcaatttcaatctgcagaattgaaaagtcagcagagggaagtaatgagatgaggaatgaagaggggcctggaatggggcaggcaggcagcaggaccaggggcctggcagagcagttaatgtgccctgcagggcacctactgcagggttccaagagccttgctgcttctttctgcaggacgtccagcatgtagacatcgattacatgaaccggaagctggatttcaccctcagtgccaactttcaaaacctcagtcttctgattgagcaaatgaagaaaaatggcatgagatttattctcattttggtatgtattgagacagatcagatcctactttctgtttccatattcatggttcaaaaatagcaccattgtgggaaactggatgaagggtaccagaaatgttcctgtactctgtactttttgttttgttttgcaacttcttgtggtgaatctataattattattttttaatttaaaagcaaatgaaagaaagaaatgaaaaggggcttttaaaagatgatactttataatatttattttccataactgtcactggaatataattattattctcttggtaaagttagaacaactgtgggctgaagcactgaagatagcaaaaaaaaaaaaaggggggggcatctcactgtttcaggctatgtctcaggagaaatagctgtatcttaatctcatctttacgtcaggaggttcaaaaatctcttatgttgtatcatcactcagaaatggtaaggctcagatgacatttcttcctaaacttacaaacaattgagttaagatccagaataccaatttattatattactaggaagccacatcttgacaaatgcagaggcaattacctgcaaatgattctctcttctagcttccaaaacttacagcattatttggtgacttttgctcacttactaattcacgtatttattgaacacagtatttgaaaaccactcttctacaagttgtgtgtgtgtgtgtgagggtgcatgcatagtctaaattagcaaggcagtgctctttttcttataaagtttttattctaatggagggagacagccaataaacatctgaaaagataatttcagacagtagtgatttatatgacaattgtgaaacagcataatattatagagaataattggggcaggtatgggatggagtgaacaggggaagatattttaaatagacagattgggacacagagagcaataaagaagtttcttgtttttgaggaacattgctattatactctggaaacatgataaattggctctctctgcttgaggattaagtcttatcaatctggtttatctccaggagttgtttccaaacactagcaaaagtttttctcaagaattttatggagaaacaccaatgcattctttttcttctcaactgtctttgtaaaaatagatttctatgtcattggaaaaaatcacttatgtcatatttaaattcctacaggattttttaacatcttatttatttgtttatttaaatatttcagggttaaactttttttaacttctattttagattcagtgtgtacatatgtaggtttgttacaaaagtgtattgtgtaatgctgaggtttggagtatgtattagtctgttttcacgctgccaataaagacatacttgagattgggcaatttacaaaagaaagatgtttaatggactcacagttccatatggctggagaggcctcacaatcatggcagaaggtgaaaggcatgtctctcatggtggcagacaagagaagagagtttgttcagggaaactcccctttttaaaaccatcagatctcatgagacttatttgctatcatgagaagagcagggaaagacctgcccccgtgattcaattacctcctaccatgtccctcttacaacacatgagaattcaggatgagatttgggtagggacagacccaaaccatatcagagtatgacagagtatgatggaatccattacccagatagtgaacatagcaccaaacaggtagtttttcaacccttgccccactccctccctctcctctcttgtagtctctagtttctgttattcccacctttatatctatgtgtacccagtacttagctcccacttataagtgagaacatgtggtatttgcatgtctgttcctgcattaattcacttagaataatggcctccagctacatccatgttgctgcaaagagcataatttcattctttttatggctgtgtattattccatgatatatatgtaccatattttctttatccaatccaccatagatgggctcctgggttgacttcacatctctgctattgcagatagtgctgtgatagacatagaagtacctgtgttttttgagagaataatttattttccttagggtatatacccagtaatggggttgctgggtggtatggtagatcaattcttagttatttgagaaatctccaaattgctttccactgtgcctgaactaatttacattcccaccaacagtgtgtaagtgttctcttttctccacagccccaccaacatctattttttgactttccaacaaaagccattctgactcatgtgagatggtatctctttgtggtttgatttgcatttctctattagttatgctcagcattttttcaaatgtttgttagccacttgtatgtcttcttttgagcagtgtctgttcatgtcctctgcctactttttaatgggatggtttgtttttggcttgttgatttaagttccttatatattctggattttaggcctttgtcagattcacaacttgctaatatttcctcccatttggtaggttgtctcattactctgttgacagtttctcttgctgtgcagaagctgtttattttaattggatccattgtcaatttttggtttcattgcaattgcttttgaggactttgccatgaattatttgctaaggccaatgtcaagaacatttcctagattttcttctaggattttaataatttgaagtctgacatttaagtctttaatctatcttgagttaatttttgtatatagtgaaaggtaggagtccagtaccattctcttgcatatggtgagccagttatcccagcaccatttattaataaagaattctttccttcttgctcatttttgtcagtttttctgaagatcagataataattgtaggtgtgtgatagtatacgttgaggttgggtaatgtgatatctgtagttttgttcttcttgcttagaattgctttggctattcaggctgttttttggttccatgtgaattttagaatagtttttctaattatgtgaaaaatgacatttgtagtttaatagatatagcattgaatctatgaattgctttggttagcgtggccattgtaatgatgttaattcttccagtccatgagcatgaaatgttttttcatttgtttgtgtcatctctgatttccttcaacagtgttttgcacttcttgtaaagttctttcacctgcttggttagatgttttcctaggtattctatcctttctgttgttgtcgtaaatgggattgcattcctgatgaactataaaaacattcttgtttttatagttcttctaggtgtgaagttggatcgttaatttgagatcttactaacttgagatttctaatttgagatttctcagcttgaacgttattgatgtatagaaatgctactaatttttgtacattaattttgtatcttgaaactttactgaagttgtttatcggttctaggagcctgttggcaaagtgtttagggttttctaggtatggaatcatgtcatccttggagagagagagtttgacttcttcttttcctgtgtggatgcatttaatttttttctcttgcctgattgctctggctaggactttcagtactatgttaaataggagtgatgagagggggcatccttgccatgctccagttctcaagaagaatgcttccagctttttcccattcagtatgatgttggctgtgggtttgtcagagatagctcttattattttgaggtacttccctttgatgcctaatttcttaagggttttatcatgaaggatgttggattttatcaaaagctctttctacatctattgaaattatcatatggcttttgtttttaattctgtttatatggcgaatcacatttattgatttgcctatgttgagccaaccttgcgtctcagggttatggaggaaagcctacttgaacatggtcagttaactttttgatgtgctcctgggtttggtttgttagtcttttgttgaggatttttgcatctatgttcatcagggatatcagcctgaagttttctttctttattgtctctgccagatattgatatcaggatgatgttggctttgtataatcagttagggaggcatccctcctcaagtcttttggaataatttcagtaggattggaaccagctctttgtacatctagtaggattttattatgaatccatttggttaaggacttttttttggttggtgggctttttattgctgatacaattttagaatttattattgatctgtttatggtgttatttcctttctggttcagtcttgggaggttgtgtgtttctaggaatttattcatttcctctagattttctagtttgtgtgcatagaaatgttcataaaaatctctaaggatattctgtatatttgtgtgattgggtgtaatgtcatctttgtcatttatgattatacttatttgtatctttctttttttctcaatctagcagatggcctataatcttgtttatcctttcaaaaaaacagcttttgcttttgttgatctgttgtatggatttttgaatctcaattttgtttagctctgctctgattatgatcatttattttcttctgcgatctttggggtaagtttgttcctgtttttatagttcttctagatgtgaagttggattgttaatttgagatctttctaacttctcgatgtaggcacttatggctataaactttcctagtgtgtcttagggatgattatcttgcataatatttcatagggattctctgaatttcttaaattcacatgttgaactctctagcaagaatggggaaattttcatggacaatatcttcaaatatgctttccaaataattttttgtttccccttctctctcaggaatgccaatgagtcatagatttggcctctttacataattctatatttctcagaggttttgttcatttttaaaaattatttttaaaaaatttttttctgactgggttgtttagaagggacttgtctttgagttctgagattctttcctcagcttggtctattctgttgttaatacttgcaattgtgttataattttttgttttaatcccagaagttgagtttaggaagttcagtttagccattcagttaaaatggctgtgttatctttcacctcttggatcattttactggcttctttgaattgagtttcaacattctcctgaatcttgttgagtgtccttgtcatacaggttttgaattctgtatctgtcacttaggccacttcagtctggttagaaaccattgctggggagctagtaaaattgtttggcagtcagaagatactctgactttttgaattgctagggttcttgtgctgattctttctcatctgagagggcagatgttcctttatctttttgaagtcgctgtcttttggatatggctttttgtttttatagtctttattttccttgagggtttgactgtggtgtatgttgagtatagttgattggcttcatttctgggtgctttcagaggcccaaggctctttaagagatatttatctgtggctgaattcctgcattgggtttcacaggcaccctttttgtttggtggtgtaatttaggctgcgatacagtagatggtgtttaagagtaagggccagaagatagcctcttattcagctgcaggcctctttcatatttcagcacagttgcagtagtgctatggggtgggggagatgggggatccagagatggcccccttcccaagtccatttttggtgcttgagggagcctcctctaatcactgatatcatgcctatgtttccttagccccaagggcgtccctgacaggctgtgctcttccctcttagggacagcctgagccaaaggtcaagtcaccatgagacctgcagctccctgttggtcctctgtacttggcagagtcagagtgggttgtggggtatgtctgggggtgatctgttgacgcagtgggtcaagggcagaagatccccaggcactgcagtgttgccgtaggggtgcagctgatatggtgccatgatccagtattttctgcacagcaaatggctttggggccctctcagcttgctctcccccaactgagtctccttccaatgtctgctctagtagctgccctgacaagctagttttgtcccaaaccttttgcacccagattgttggtctgttggatgttctgagctatggagctcccttgggcagagtctgtggctggtaaacaggctacatccttcccagaccagtctggcagagggaggcatgcccaactcccacaccagcacacaagcccatacctcactcttctcagtgttctgagagtggggctcctcccctactcaagcctcagccgcagatctcagctagataatcctgatttgtgtgcttaaaccctggtgggttggtactgggcctgcagctttgttttctggccttagggtccagcactggctctgctgggggtcagagtacttccaggccaccagcaaagcactcaggtggggcagtggaggctgtgctgtgtgcattctcttttgggagcagccaagcagtggccttggaaggggctggcagacgggtggcatgcagatcagatgcacccttgttctgtaggaaagacaacgctgctgtctcccagctcagctgtcagcaggggctagagccactcagagcaagatggagagcctttgcagatgggtcctcatggtcgtgttttgctgcagatgccctgtatgcagaaccttctcgtctccgcacaggcttgagctctgcctctgcctactctccaggcagtttctcttgccaattcaaatgtctatggtgtttgtggggtctgttgtagctaggatcccagatgtctgcagtgcaagtttcccttcactcactccttccttgggacctgttcagtgccaggagctggtcccggcactcagcaactctatgtgggatttccagctttctccctcttacacctcagtgtttgcattgcctctctatagactggcagtgttatctttcaaaagctctgtttgaagtgtaatggtttactcagtattttggtttttctccatgggagaggtgcttcccagccgcatctagctggccatattgtcccctttcctctcattttattacttacaggttggggtggtaactttttgtagtatagaaaggctccttcatttgttggcacagattcttataccctttgaaagagattacccctcataagggttttatatcttactttgagtactcatggcaccatcccttttcaattggctatggtaatatatgcagtaagacataaggcaaattatcaatgatttttattttatttcattttatttttggtattgagattcaccatttccttctgcactatgaactactaaatttttggagagaaattttcttagagatgttttcctcacatttgctgtttgaaattcttttactgcaggacccagccatttctggcaatgagacacagtatctcccattcattagaggacaggaaaataacgtgttcatcaaatggcctgacaccaatgacattgtctggggaaaggtaaggcttggggaagatgcttacagttaattaacattacaatgtcttgaaataaaacagctctcaatacacattggaaaatatattggacaatcaataaattatgaatgagtagaaatctgtccgatgctgattagctcaataagcattaataagaccaaggttacaaatctcatcctctattattattgagcactgtctattgcctggaaatactctgatgtccccactctttatttattccacatggtcattaacaaacattaagaatccctttgagaatgacactgaaatctgtgtctcccagacacctgcatgcaaaacatgcgttcacctttgacctatcatgcttaatctgccttcatatctaaatgaatcattaagtcctatagattctcctctttctcttgtttcctttaattcgtctttatggcttcaatcttcatctttatatgtctgatttttggcaatagcattttaggtggacttcaggtgataatagcttttagcctaggttcgaattcttccttaattatactatgctacttcctactgctctggatgtattccaggctccttttttttttttttttttttttttttttttttttttttttgagatggagtgtcactctgttacccaggctggagtgcagtggtatgatcttggctgtctgcaacctcctcttcccaggttcaagcgattctcctgcctcagcctcctgagtagctgggattacatgtgtgtgccaacactcctgattaatttttgtatttttagtagagatggggtttcaccatgttggccaggctggtctcgaactcatgacttctggtgatccacctgcctcggcctcccaaagcgctgggattacaggcgtaagccactgtgcctggccctgtgctcactttgaatattaccttctcaacttacccagataatatcttcacttcaagatcaactcaaatcttacctcgtttgaagcagttagtaactattttagtttttcctattttcccttgtctgtaatattgccttcagtatagcatacagtgtagcatttatgtactatctgtgaactcttaggaaacaagtactatttcttacttaaatctcagtaaatacagatcctggaagagtgcttgtcatataggaagtacttagtaagtgtctgttgattgaatcaattaatcagtgtgtatatacttaatgtcctggtagttacagctaaaattagttggtactatggattttttaatgctacatatacttggagtccgctataagtcacgatagtgcttaaaagtattgaggtgaggtgtatgggttatgaatggaaatcaatcttatttctttagagtcacacttcatacttattatgaattttgttataggtctgtgacaaggagatcagagatctgagaaatcactcgaaagttggttgttcagaggatatgtttaaaagaaattcagttaattattaaattcaaaaatagaattttgaaaacatagaatgaatcaagagacccagcctactttcacctaatgtaattttgtagattcagcctttacagtttaatttatggcaaagattcccaagcgtttcatggagatgcctgtcatcagagtctaacacatgaaatatctcatagtctgtatgcaaggatctgtaaaggttttaattgcccttctttttctctaggtttggccagatctgcctaatgtaattgtagatggatcccttgaccatgaaactcaggttaaggtacagttgtatatagatttttgtcaacattgccctaaacatctggatatttacattttttatcctgatgaataagtagctaacccttcagttaagtagccctaacttgagggtgcttatccactgttagtttcttggcagaaagagatcctcgagtggaaagctcaacaaacagcgaacatggaaatgtgtagaaggaaatcatcaatgaaatcctctcataagtgtgattttaatgggctgtgatttgtttgaactttatgacgcttgaaaaataatgaaccaaagtctagcattttctcactagaggggaatccattatgaacagactggattttaataaattatctgcatacaaaagaaaatacaagtcagctgaatgaaggaaagttgttaatctcagcctggtcatctagcatcccctctactctggagttcacttgcccctggatgacagtcctccttcatctcatttgaatagtctggaaaaagcttttgctaatatcacactgatatttaagtaaaaaaaaaaaagaaaaagtatttgcatctctaaagttcaattgttcagacactgttaattttccagtcttgtgattacatgtccagttattaaacaaatcctgtatttgaaagggattataaagctatctaaccttcttctaagaaaataaagaatgaagtcagccttccccaatctctgcttctgttgtaaactctgcaacagcagcagatctgagattagagcagagactgatctgggcaggcacaaattcctgttcatctcccatttgtggtctcctgtataggctgagaccccgacaatgagagtgtgtgttattcttacagctttacagggcctacgttgcctttcctgacttctttcgtaatagcacagctgcgtggtggaagaaagagatagaagagctctatgcaaaccctcgagagccagagaagagcttgaagtttgatggattgtggattgtaagtgcacccttggttgtcttttttttttttttggaaatgttagcaagtcaaaacatggggaggagagactagcaaagcagagacatagggctgaagagatgaaagggagaatctaggtgctgttacagaatctaggtgctaggaccaagagaagcagagatcattgctgatctgcccagggacatattgtctggtggatgttggagcccacagaggagactgctactgctggagatgccagagcaaaagagaaagggagaaatcacctcccatctccaatctcttgccaatatcacccactggccaaatctacctgaaagcttattgtaagggagtcttacagggcagagctgggagtgggtgaggcatggagttgagagcaagtagacgtttgccatagtactggggcagacaactctgagggaatggcttaaagggcctgttcagatgtttgctgtaaatgccagttggccttaaaagcaggacttcctgagatgtccctgggatatatgtccaagggcagctctatctatgttttcctctgtcctgatttccttccccactgtccagtggcctgaaatcttaagcaagctctaggccagctctgaagagctattcagctctgggtcagactggaagaagtctgtgattcactccagagacaaaagtccactgaaaacacaggggcctccctgaccacccgcacctttgagatagttaggcacagaatagacatgtgaaaggacacaaattaactcaaacaggcaaatcagacagtggagagttgtgggcagctttgagaataagagatgctgatagctctggggtagtattttttttttttttccaatggagggaaagctgtagctgggtaattcaaagtaatgaatagttcctcaagtactttcatttgcctttagtatgtcctatttaaaatagtctggctttcgaaaatttaacttttccattgtcagagtgcacagtgaacattcccttaggagcccctactccttgcatttaagtaacaaattccccaaagtatgtttttatttccaaacttgtttctgagttacatataactttttagaaatatatttatagcagaaagtgagataactctccttgtgtttggcctatgccaatatcagaattagtccaagcaactggactaagaaaaaatagaggaagataatagtaacctctggccatagactaaaaagtgaataatccatgcgtagtaaaacaagatgggctacctctgttggggagttgtatcaaggggagttgtatcaagagatttccttaggtcctgtgtccagcattacctcactatttttgccactgtaaaacaatccttgtaagttttaaaatgccaggtaagcaaggagtttagcactccactttggccgatataaatttttagagtccatttgggtcaatgccagggattacactacacatttttagagtccatttgggtcagtgccaggaattaaacacagtgaactaaaccaccagctgagctgagggcttcaaaagtcatctccctgagttagtgtcctctatagccaaggccatcctgcccctgacatgacgagatctttttttgttaactcatttcaggatatgaatgagccatcaaattttgtggatggatctgtcaggggctgcagcaatgaaatgctaaataacccaccctatatgccatgtatgtaaaataattacttcatcaacttactttcctactcaaagactccaaaagttttccttttactgtcaaagtgaagcctaatgttgaagacagaaaccattctccaacatgacatgaaatcccaagtaagataaccttgaataagtgcagctaaactaatcaagcaagaaataatgacatgatgtggtgtgaaagaaaccaaacgatgcatggtacatttgattccattgataactatgaacagattgctaaaattttaaataaacccttaaacacacacacacacacacacacacacacacacacacacacacgtggagagatgttcttttgattaaagaattaaaacctagtttctgaagtctctctgcccatgtaaacagacatttgatgaaggatactttttggtcattctgtggtacaaacaaaaatagaatgttggtatcaaaaggatctcagaaagttgaatcttctcgtgttgcagagaaacaaggaaggaaatgactcacttctaaaagtactgtaccacggctgaggtgggaggattgtttaagaccaggagtttgagtcttgagaccagcctgggcaacatagtgagacccataaaaaaaaacaaacaaacaccaaaaaccagaaaaacaacaacaacaaaaggcattataccagtaatctatgggacagaatctagaattcaagtttcttgatgtctacatcactgttatgctgcccatttctcactcactcactcattcattcattttctccttcattaatttaatgcagggggtgtttgacttgcaatggtctgacttatgattttcaaccttacaatggtaagaaagtgacatgcattcagtagaaaccgaactttgagagcccaaataaccattctatttttcactttcactatagtgttcaataagttacaagagatattcaacactttgttttaaaataggccttgtattagataattttgcccaacttaggctaatgtaagtgtctgagcacatttaaggtaggttaggtccattcaatgcattttcaagttacagtattttcaacttgtgatgggttcatggggatataatcacattgtaagttaaggatcatctgtacttatgtatcaagcaaatgctgtcaaatcagaaagatttagagacacaaatacaaaaatgattgaaatagatttattccctggagaacattaccatctagtggaagaaacagtcctaacaatgaaggagtttattatgttggcaaaagggctatgacaacactctataaattaaatcagagttggtgcaaaaagaaggggagctgcttttcccagctccatattttatccttacccttcattagttataaagacacagaacattgttttctatagactaaaacctcataaaattgggtctgttactggtaacaaagttgttgattgaagtaaagaaatgccaaaatgatgggcatttctagtgaatgtgcaaatcatgttgtttaggaaataactcaacatttcccctcagatttggaatctagggacaagggcctgagcagcaagactctgtgcatggagagtcagcagatcctgccggacagctcccccgtggagcactacaacgtgcacaacctgtacgggtggtcccagaccagacccacatacgagtgagtgtctttttgtcacagcagcaaagataattttccacatcattccttttgccatttcatatttgcattgtgcatgtatctacgtgatccgagttaaatgggttaaagtcaaaatttcaggcacggttgcccaagcaaccacctctgagcgcatttatcaagtgggttactaaattcacctatttaaagtgagcaattaggtaatgtttagtatattcatagagttgtgcaactatcacaaaaattaaattttcgaacattttcagaactcgaaaaggaaaacctttgcccattagcaatcatttctaccttgttcctacctcctgagccctagccattactcatctattttctgtctatgtggattgcctattctggacatttcataaaatggaatcacacaatatgtgctcttttgtatatgggtactttcacttggcataatgttttcaatgattatctatgttgtagcatgtatcagtacttgatttcttttgactaataaaatttcattatatagatacaccatattttgcttgcctatctaccaatgagtgaacatctaaattgtttccattttttttttggctattatgagtagtgattatgtgaatatttatgtgcaagatttggagtagacatgttttctttgttttgaatatgtatctaagagtggaacttctgtgtcatataggaactgtatttttaatattttgaagaaatatcaagctgttttctaaaaaggctgtaccattttacttttttttttttttttttttttttgatggagtctggctctgtcgcccaggctggagtgcagtggtgcaatctcggctcactgcaacctcctcctcctgggttcaggtgattctccagcctcagactcccgagtagctgggattacaggcataagtcaccatgcctggctaatttttttgtattttttagtagagacgggtttcgccatgttggccaggctggtctcgagctcctgaccccaggtgatccacctgcctcggcctcccaaagtgctgggattataggcatgagccatcgcacccagcctaccattttacattcttacctgcatgtatgataaaatgtataagagttgcagttcctccacatccttgccaacactcggtggtattcatctttttaaattatagacattctaatgggggtaaagtgatatctaattgttgttttcactttatttcactaatactaatgttattgagcatgttttcatatgctattggctatttgtatatattcaaatatctattcaaatcctttgctcatttttgatagaatcattttttttaattattattgagttgtggccaggcgtggtggctcacacctgtaatctcagtactttgggaggccgaagtgggaggattgcttgagtccaggagtccgagggcagcttgggcaacataatgagaccctgtctctacaaaaaacaaacaaactagccaggcagaatggtgcatgcctgtagtcccagctactcgagaggctaaggtaggaggatctcttgagcctaggagtttgaggctgcagtgaactatgatggcactgcacttcagcctgggcaacaaagtaagactatctctacagaaaaaaaaaaattattggatcgtaagaattctttaaatattctaaattcaagcttctcatgagatatatagtttgaggatattttctctcattttgtaaacttttcacttccataaccatgccttttggagcacatttttaaaagtttttataaagtcctatttattcatttacttacttattcatttgtcacttgtgcttttggtgtcatattcaaggaactattacctaattcaaggtcatgaagatttattcctatgtcttcttctaagagctttatagttttaggtattacaccaagatctgtcatccattttaagtttatttttgtgtatggtgtgaggtagtggttcaatgttattctttccttcattttattatcttgacaccttgtcaaaaatcaattgacagtaaatgagaaggcttatttttgccttctcaactctatttcattgatctctctctctctatatatatatatatccttatgccagtaccacactgtcttaattgatgaagtgtgactcttccaatttttttttcaagattgttttagctactatgggtcccttgcatttgatatgaattttgtaatcactttgtcagttttgacaaaatagcaacagggattttgatagtttttacattgagtctataaatcagtttggtgagtattaccatgttaacaatattaagtctcttttgattcattagcatgaggtgtctttccacttatttagatctttaattttttcaacaattatttttagtttttaatgtatatgtttttggccattatttctataaatatttatctgtccctttgtcttttcttttatccttctgagattttgccactttccaatgtcgttgggaaatttcagacttgttctttagttcttcccaggacagagtgtgatcttttctgttcaactgcccctttctgctcaagtatctgagctctctgccttctgtccccagagtttacaagaacctcatactatttgattttgggctatcaacaggtgatgtatcatgttgcccctggtgttccacaatcaggggcaacatggtcttccaaacagaaattcttcttccctttcccactttctttacatcttcatctttcagttgctctttcacagtcttgctttccacacctagcttgaggcttttccaaccaaggaaaaactagttcttcaggaaaacacccatgtcattatatgaaatacacacaaaacaaataggtgttttgcaacctcagagataaccttaccttggaagagtacaaggatgaataagtcacagtccctgctttcaaggacctcattgtctaattataggagtcaaacatgagagggaaaatcaattaactctactgggataatccagaaagtcttcatagaagaagtgatgtttgaatgttggttaaaagaagagtagaaattttcttttggcaaagaaggggctttcagggcaaagaaagcagcaataagaagatgtgaaaacttgataaagtttctaccaaaagctcaactttcccatgcaccatcccctcctctctcttcagggaaatttgcttttcacacatctgcatcccatcgccatctttctcttcagagaagcttgctccacaaattatacttttccatgggtgctcgtttcttcatgaattattttttatcttcttcctcactgctggtatattgctttaggatttaggctgtgaaatcttctaactaaactttctcatctttcaaattggaaaaatcatggcatctattgttaatataaaaattaaatgatataatgaatccacaagtacttggcatattgtaagcactcaacaaacattagcaatattttttaattccttttcatcaatatttgaaaatgccccagttgttcttgcttttgcctatatcctcctccaaccatcatctaatctttcaactccctctcatattcaagctgtttgaaggaactctttccatacatgatatatatattttttaattcccatacaccttgatgtttctccctttaccaatcacaaatgctggtcattctgaccttgatcaggctaatctcttagcacatacaatctaaagaccaacttacatctatttccttcatgaaacctgctcagattactccatccctcctaattccctccttctcttaactactaacctgacagtatgttctacattttaagttatttcctctacacacctggggagaagaccatgtcttctttgctcttttctgtccaagcactgaaccatttttatttctttttatgaaaatgcctttgtttgtcagccctgagtgcctgcattgatgggagagctcagcgtttgtggcatcagtggtcagttttgttcactgactcttccctgctgaccttcatgctacatcctctgctgaccttgaggttcacaatattgaggttcataatatgccctgctgcatatgctctgtgtgcttttgctagtttctcaggatcttgactgtgctttccaacctagattccagatatttatgcatttacctctctggccacagttccacaaactcctttgcaggtttcccttcccagtctttccaagcctatgctccttccacacctgggttcagtcatctttttttttcttcacaccatgtagcttttcccttggataagcacaaacacatactactggctttaaatacactctggattcagatggcccccaaatctttgttcccaacccaaacctctcttgagcctcaaacctagaattgcccatagctgtctcatttatgatgtcccataggcacttcaaatctaatacttaaaatgttgaactatttatctctcccttaaacctgtcctcctgcagtcttttctttcttcttcttttttttttttttaagatggagtctcgctctgtcacccaggctggagtgcagtggcacgatttcgactcactgcaacctccatctcctgggttcaagcaattctcctgcctcagcctccctagtagctgcaattagagttgcatgccaccatgcccagctaattttgcatttttattaaagacagggttttgccatgttggccaggctagtctcgaactgctgacttcaggtgatccatctgcctgggcctcccaaagagttgggaatacaggcgtgagccactgcgcccggcccctccagcattctttattttagtgaaaggaaccaagtttaactagtcattaggtcatcctagattctctttcttttcctgctttcagttggtgactcagttctttgcatcagtcactactctatcttcctgccttattccaggccttcattatctctcatctagactgttataaaaatctaagctatcctcacccccatttctttatcacacatacatacatatgcattcttccaatttgtgtatggttaaatctataccttttacttcattatgttttgtccattgtttttatttgaaattcctttctcttgtagaaatcaggtggtttatatattctttcagttttaatagaacatgtgtgtatgtgtgtgtgtgtgtgtgtgtgtgtgtgtgtgtatttccattcatttttggatttgttttggtgtgaaaaattggaaataacccaaatggattagtttacacaacagtagtcagctacttttcctgacatcatttattgactaattcatctgtgtctattgatctgtgatgcttttttaagcaaatacttggattgtatacatactaggatctattagtagactttctcttttgttcagttgatttttccctcacacagttgttgttattttctaagggtgcgtgcagatgatccatcttccactgaaagataaacatcttttatgtatatttgcctctgtgtgcaaaacatgtctcgctttttgaggtacagaaaagcagagtgaatatttccaaaatgctgtagcttttatttggatcccagatctgcctccttattctttttttccctcttcccctgtctgccatgtgactacagacacacgtgcaccaccctgcccagctaattttatttttttgtagagacagggtctcaatgtgttgcctaggctggtcttgaacttctggcctcaagcagtccttctgccttggcctcccaaggtgctgggattacatgtgtgagtttctgtgcctggcctcctttttactcttttttttttttttttttttttttttttgagacagagtcttgctctatcacctaggctgaagggcagtggcacgatctcagctcactgcaacctccatctcctcaggttcaagtgattctcctacctcagcctcctgggtagctgggattagaggtatgcacaccacacccggctaattttttttttttttagtagagacagggtttcaccatgttggccaggctggtcttgaattcctgacctcaagtgatccacccaccttgacctcccaaaatgctgggattacaggtgtgagccaccacacccagacctctttaccctttaaatgacctttggtaagcattttaaagatcatcttattttgtccagctcactattttcaggcgaatgcctttctaacttctctgaatcttagcttcctaacagtaaaaggagtgcaaggaaaccttttcatgatgttatgagacaccacataggaaagtgaccggtataatactggaatagaggaattgttccataaatagctatattacgcctcactcccacccctttctcttactccagggtgatagttaattaaccagatttttcaaaaatgaaacccacattctacgtgcagatatacctctagtcttgctgtgaagtttgttgggatctttagcatggctttgagacagcagattctttcagggaagaagttatctgactcggaccgaagtaccctcaccctctcatgctccaagctgcagttattctctgtaaaggagtttgtttcttcaactcacctctttattcccctcccaccagagctgtgcaggaggtgacaggacagcgaggggtcatcatcacccgctccacatttccctcttctggacgctggggaggacaccggttgggaaacaacacagctgcatgggaccagctggggaaatctatcattggtgtgtgggctcattcccaggggcctgtgctggcagggagggcactggagtttgtgctgttcaacagcactggttatgtctctatcatcatctaggtgggtggtaaaattaacaagaactgagttctctctgggcgtggattttaatttacacccatcttttaatattttcatcatggtccagggctttctaatggggtaaggaaaaatcaggccaagccttcactctcctcccaaagtgctccttcctccaacacagctgtgtcttctctttgcaggcatgatggagttcagtctctttggaataccttatgtaagtcacattcagaccattactaattgcccagtcagattttagtgagtcagcgcctcatgaaattcccacctcatgctctcattatgcatcttctcagacaggagcagatatctgtgggttctttggagatgctgaatatgagatgtgtgttcgctggatgcaactgggggcattttatccattttccagaaaccacaacaacatcgggacaagggtgaggcagtagttcgtgctccaggtgttgtgtaccctcaaatcataacttctttttaacccccaggactattatactcatttcctgagaaaaatcaaaaaacatcaccagaatcttaatttcttggaaaatccacagagttcagaactctggaattatcagtaatttttagaaatataccttttctcatctcctggagaattactacccatgaggaaaggtttttatagttccacatggggctaaaatgaaagaagatccctttgcttttaagaatattgaatttgtattttactcaaattcatcgaagatatgttggtgctgcacggaaacctctctctgtacacatgtagagggccagagctggacctattccagggacttaggaatcagtgataaagaggagaaagcaagaaattctaattttgtagggtggcagagatgggggaaagggtaggccaggaatgaaagggtaagtggcttgtaacctacattttgaataaatgcccattgattcttttctgatgccactgggatggaatgaagaagaggtgatccattatatgcttctttatccttacagagacaagatcctgtggcctggaattcaacctttgagatgttgtccagaaaagtcctagagaccagatataccctgcttccttatctctatactctgatgcataaagctcacgttgagggcagcacagttgtccggccccttctccatgagtgagtacagcctctttccccaagcatgtcttgcaaataatcctctgtagcagtcataagaggataggtgaatttttcctgtttatttttttaaggtttacggatgacaggacaacatgggatatagaccgtcagttcatgttgggccctgctatcttaatcagccctgtgttggaaactgtgagttcttcattgtaggtcagaaaaccttcaatcacatgatctaaaatcatgggaaaagcattttaaagatcatcttattttgtccagctcactattttcaggcgaatgcctttctagaacatctacaggagatctttttcttttatttaaaagatctctctgttaatgaaagctttactacactgactgatttctcattttaaaattttgtcatttactttttaaaaatagttttttctgtagttctgaggaataatttttcaggatttttcttaataaaatccctcaaattattgcaatcactaatacaattttcattttttatcttaattctacagtgttttgaaaatgaaaatgaaaaatattttttgaaatattcataatgacatgtcaattttatgtttcagagcacatttgagatctctgcttattttccgagagcccgttggtatgactatagcacggtaagaactaatatatttgtgaagaaccagtttggtctatgcagggtggagaggtggatagagccttctatttccaagcacatatttcctaaggcaataattttgacctttttagccttggcaaggcttgtttaaatgaaagcatgtataagagcatagacgaaatctaagcacctacatctcattgaagctcccccctcacccttgcccttgcctctcaacttttctggagaaacaaagacaagtctagattttcagtcttaagcaaaactgaaagatcagagattttctctttaggtttgcagtcttttgctgactttctaacatgcttcccaggaaaggaaggacttgtaattaaaacatgctctcatttaatatatttatctctcgccattttttgcctgtattctcctttctagggaactagcagcacatcaacaggtcagaggaaaatcctgaaggctccccttgaccacatcaaccttcatgtcagaggaggctacatcctgccctggcaagagcctgctatgaacactcactccaggtgaggagaagaggcaatgtctaacagcctcttgctataccgtaatgaggaagccttacaggaggctgtcccaccttcgccagggatatgtggattataaactaaattgccaaacagctttactggtcagatcctgtgagtgctttctgagtgggactcggaggaagatgagttcataaagttagtcttagggatatatatacacacatatatttttgtctgtagtgctgtatcaaaggcaaaaattttcctgaaggcagaaaaatgtttctctttccacactgttaaaaaggaatagggaatgttaatgagctctttgacttgtgattgaacaagaactaggtaggactgagtccttgtcctatcctagaacttaatgttcattcctaggtctgctttggtcaatcaaggaaagatatgcttgtgtgttgtgtgtgtgtacatacacgtatataaattacacatataatatgtaaaaatttataaaatcattgattaaacagaacacgtcacatcaagaaaggcacataataacaagtcaaaaggagagaagttaactttcagccttgtggtataacacatggtttatatgaaagagggctttgagctggatcttttagatttgaatgtacaaaggggaaagagagatcctggtcgattaaagaactgaaggtgaaaaatggcttgggtttgggaacataaaccatccagtttaactggaggacagataaaggaagagataaaaataagtaaaactccagcaggttaggatcagatcctggagggtggtgaatgccaagccactactttggattttattctgtggcaacctggaagctactgaggattctcttttgagggattttcttcctatgaaattaatatttcattatattacttgtatgtatatttgatttttagaaattgaagctaaaccaaatgttttattaaattttaaacgttttccattaacttttaaatgtcttatattttatctattgtacctatttttagaactttatatgcatatttaatacatttcttttatttctagataagtaatgtttttaacacagtctgttctttattcttacaacctacaatctagagaaaaataactcttttttttttttttggtagtcgacaaaattttatgggattgattgttgctttggatgacaatgggacagctgaaggccaggtgttctgggatgatggacaaagcattggtgagtataaactttccagggtccctgtacatcactgagaaaaatcataccatagaggctcggcatataactaacatgaactgaaaacctctctctgcctattgtcaataaggcaataacatttggagaatttttccaacttttgcctgctcatttatattatactatagttagtatagactgggtacagtccccagctttgtaggttcagaaacttgctgttatgcattcagccagggatgatctatctctgtataactgtctcactcttgatttaaaaagaagtgtggatgcaaatatcaggctgatggttaattcattctcaatgggacagaaacatgactctatcatttggatcagccatctataccaggcaccctgttcctcacaaataggcctgctcaagaggcaatttagaggttagaaaatttcttggtgactcataaattgggaattaagtgttgcccaaaggatacttacatcgatgaaatattaatttgtatgtttcctttccccagttgagatagagtatgttagttctacttaggtaagtgagatttgtcattatcatcagaacaccctctaactcagaattttctatagatatatggacacactgttactagctgactctcacttttcactacttattactgtggaccagaaccttctaatcttgcaacataccacattttctgaaattatagtatagcttatttttcactactaatatttctagagattccttcttttttaggttccttcattataaagataagaaattctcattaaagaagtagatattctttacaacacatgttaaagacagaaaattagaaaaaaatacaagcacttttaatatttttgctgtactaactttggcttttgtattaagaaaatgcttaatttttaatatggctgaaaacattttgcatatttaatttgtgaatcctgtttattttcctctaacataatgacagaaacatgtgtgaatgttattatttgttccttataaataccattatgtatgatgatcatattctattgagagaatatgtacaggttggttttaattttcattgttataaataacatcctttttcttttttttttcttttttttttttttttgagtctcactctctcattcaggctgcagtggcacgatctcagctcactgcaacctcctcctccctaattcaagtgattctcctggctcagccttcccgagtagctgggatttcaggtgtgtggcacaacacccactaatttttgtatttttagtagagatggggtttcgccatgttggccaggctggtctcgaactcttggcctcaagtgattcacccacctcggcctcccaaagtgctgagattacaggtatgagccaccgttcccagcccatatataacatccttgagtattaaccattgtttccattttagattacgtccatagagtagattcctggaagtgatattactgtcttttaatcaactttaaaaaagttgtgatttatacaaataaaatgtatccattttaagaatacagttaggttttgacaaatgtgtacagttgtatagccactaccacaatgaagatgtggaatatttttataaccctgaaagttcgccttttatagtcagcctgcggattcatccaactgtggtttgaaaatgcagttagcctacaatagttgcatctgtattgaccatgtacagacatgtttttcttgttactattttgtaaacaatacaggataccaatgatttacataatgtttacattggatcaggttttataagtaccctggagattatttaaagtacacgggaggatgtgtataggttatatgcaaatattataccacaaaataacttacattcaaataataatgtcagattcattttaatggtcaaaaaatgaaaccactgaaatattcatcaataagtatattggtcaatagtcatggaatattaccatggaagacaccatggattattattaggaataaaaagcaattaaagcaattaatttcttttacatgcaacagcatggatgaatgtaaaaggcatttttgctaagtgaaagatgctaaaaatacaaaaatagtacatattgtatgattctattcatataaaatctagaaaatacaaatccagtctatagtcacagaaagcagaacagtagttgccagatcctggaaggaaggatcaggactggggagaagctgactagaaagaagtactgctgtccctgggtatccataggcggttggttccaggacccctgcggatatcaaattccacagatgctcaagttccttatataaaatgataatatttttataatttcaacttttattttagatatagggtgtacatgtgcaggtttgttgcatggatgtattgtatgatgctgaggtttggggtatggatcccgtcacccaggcagtgagcatagtaactaatgggtagtttttcaacccatgcccccattccttgttaccccatctaatagcctgcagtgtctattgttctcgtctttatgtccatgtgtactcagtgttcagctcccacttataagtaagaaaatgcattatttggttttctttttctgtgttaattttcttaagattgtgacctctaactgcatccatgctgctgcataggacatgatttcattcttttttatggctgtgtagtattccatggtgtatatgtaccactttttctttatccaatcctttgctgataggcacctgggttgattccatgtctttgtaattgtaaatagtgctgtgaggaacataagagcacatgggtccttttggtagaatgatttattttcctttgggacataccaagtaatgagattgctgggttgaattgtagtcctgttttaatttctttaataaatctccagactactttccatagtggctgaactaatttacatttccaccaacagtgtttaagcatttccttttctctgcagccttgctagcatatgttattatttgactttttaataatagtgggtttgatttgcatttctgtaatgattggtgatgataagcattttttcatgtttattggccatttacatgtcttctttagagaagtgtctgttcatgtcctttggctattttttaatggggttatttgacttttgcttcttgatttaagtttcttatagaatctggatgttagacctttgttggatgcatagcttgtgaatactttctcctactctgtaggttgtctactctgttgatagcttttttcactgtgaagaagctctgtagtttaattaagtccaacttgtcaatttttgtttttgttgtaattgcttttgggggcttagccaaaaatattttgccaagaccaacgttgagaaatcagacaagacacataaatggaaaaaaacattccatgctcatggatttgaggaatcaaagcaatgtacagattcgacactattcttatcaaactagcaatgtcatttttcacagaattagaaaaaaactattctaaaattcctatggaaccagaaaaagagcccaaatagccaaagcaatcctaagcaaaaagaagaaaaccagaggtatcacactacccaacatcaagctgtactataaggctatagtaaccaaaatagcatagtactggtataaaaacagacacatagcaatagaacagtatagaaaatccagaaataaagccacacacctacaaccatctaatctttgacaaaggtgacaaaaacaagcagtagggaaagactctattcaataaatggtactgggacaactggctagccatgtgcagaagaatgaaactgaacccttacctttcactgtataaaaaaattaactcgagatggattgaagatttaaatgtaagacctcaaactataaaaatcctagaaggaaatgctcttcatgttcttctttttctttggttattttagctcttttgtatttcacacagattttaaaatcagcttgtcactttttaacaacaagaccaccttctggaattttgactgtaattgcttttattcttaagaccaatttttgaatatttgtcatctcttttttttctctgtctctttctctcatctacttacctacttatctacctatctagctctatataattaccatttacttagatctttaattactcttagcaatgttttataatttttggcgtatagttcttgtacatattttgttaaatatgtcctaagtatttttaagtttttgatggtattttaaatatattttaaatttctcctaacagtttatggataatatattataacctatattcacttaatatgatatatgagagatatttttcaaatggttttattttctatttatgggtgaaaacttgctaaagaaaaaatatgaaggaattaaacaacttctctcttcagagctcagttcagtctttggacttgctttttaacataatctgataagaagctctaggagaggcatgtggtattctgaaattaaatagatctaggtttgaataccatctcagtaactttctagttgtatatcttctggaaaattacttattttgttgtctccatttattcttctttagtatctacaacatacacctatgttgtaattttatgaggataaaatgatttaacatacataaaacattcctggcacatgagttctgaacaaaatgtgttattaatatgtaaagtaaataaaactctattctaaacatttaatatgagctactttacataaaattagcatgtctaacttatgaaaacaaaatgaaaataaataaatacgtaaataaaataaagttagtgtggttaataagataataagacaataaggcatccaaaagtcaaaaagaggaggttgaccagccatcctgaatttcaaagctgtagcaggacttgagccttataagggcatactacggtgccaatttttaaatttaagaactgtatttattaaatgcattttaatattcctgtctcttgggaaagtacatattttttctcaaattaagcctttgtgaaagatgaacgtttaatcaggggtttgctaggtgagcaaggaatgataataaaaggagttagtgcccatgattagacagtcaacactttggtacctcagtgagtcttgccaatgggactgcagactgtttttgttgtcagatcatgacaagtgcttggtatatatccattcatcaattgatggacatttgggttgtttccactttttggctattataaataatgctgctatgaacatctgaatataagtccttgaatagacacacttttaaaaactctcttgtatattatacatacctgggagtgaaatttctggcttatgtggtaactctatgtttaactgttgataaaatatccaactgttttctatagaggcagcaccattttacatctcaatcagcagtgtatgagggttctgatctctcttcttccttgtcaacatttattatctatttttttaattatgatcattccagtgggtgaaaagctgtagttttttgtggttttgattaatttatatttctctgataactaatgttgttgaacatctttacatgtacttattattcatgtgtacattttcttcagagaaatgattgcttatattcttttcacattgtaaaattaaagtgtccttattattgaatcataaacagtctttatagaatttagctaaaagtcccttatccgatgcaggattttcaaatattctctctcatttagcaggtgcctcttttgaggcacaaacttttaaattttgatgaagtctaatttatctatttttttctattcgtttaatgtgcttttggtgttatagctaagaaaccattgcacattacaaagtcccaagtatttgctactagattttcttctaagagttttatagttttagctcttacatttaggtctttgattctttttgagttaatttttgtgtatggtgtgaggcaggggtctaacttctttcttttgtatgtggattacagttgtcccagaatcatctgtgaaaagtctattatttttctcattgaattattttggaatttttgttaaaaatcaatagaccattactgtgaggatttatttctgaattttcatttctattgccttaatctatatgtctattcttatgtcagcactgcactgtcttgattacagtggatttgtagtaagttttaaaatcaggaagcatgagttcttcaatttagttctttttcaaaaatgggccttattttaaagcggtttttctcaacctcagcaatactgacgttttgggctaaataattattttgtggtggtggctgggctggttattatacatgtttagcagcatccctgccctctccccacttgatgtcaaaagcaaagttatcttcaagataactacatgatctctaaatattgtaaaatgtctccagagaggcaaaattactgctggttgaggatcaatgttttaagagaacatagaaagtcctttgatacaggtttagctaattaggactagatgagtgatgtcatagtaggttaataacatcacaattagtatgcaaaatcaaccccctatgagcaatatgtttcaaaaatttaaaggaataaagccatttcctacaagattttaactttctattacagtatattttagtcttaagattaaaaattaatagtacctgaaactttcaaacttgtaaatttttatggagaaggtttttagcctttttaaacatcaaatatgcttaaaaattcaaattcagactactaagatacagtgtaagtgtcatttaaatgttctattagcagacttggaaccatttatttaacttttcctcacataggtgatataatggctgttcaaggataatcttaaaagaacatgttaacagaatcccattctttacaatttttttattaactgctagaagaggctgtagtgtttgcccaggttgcattttctagccaagactaaattttaaaatatgagttgtataattgcttccataaaagtggaggtaatttagaatacttcgagagttagttggtttgggagagaatatgttggaatactgacaagagttggaatgttgagaagggccaagaacagaacatgaagtgaaactgatttttcagaaacagggagttataggaaccatatgggaaggagacataaagtaaggagtatttcaaaggagaggtgtgtgggcaaagtggcctaaaaatcctgaacagtgtgaggagatatttagattttatatactatgtcactggtgacttagaaagggtcagattccatggaaaaaggaaacacaggagctggagtttaggagatgtaagattgaattatgagttgggtacacagacataacaagtaaaggctacatttatttatttatttatttatttatttttatttatttttttgagacggagtctcactctgtcgcccaggctggagtgcagtggcgcgatcttggctcgctgcaagctccgcctcctgggttcacgccattctcccacctcagcctcccgagtagctgggactacaggcgcccaccaccacgcccggctaattttgttttagtatttttagtagggacagggtttcaccatgttagccaggacggtctcgagctcctgacctcgtgatgcgcccgcctcggcctcccaaaatgctgggattacagtcgtgagccaccgcgcccagcccagcaaaggctacctttttaagatgtatggtaataaaaaggagatgcggtagtagctcgatataaatagaattaggtaaaagtattatcagaacagagtactctggagcataaatgtagcttgaaaaagcagagaaggtatagggaagaatcgatggaataaattctacagaggcagaagtgcttggaatctggagcactgtgggaggatgagctaagagtagggagagaagaatggtgaaggtgaagattgatgacgactttgacgacagtgagcaatcaattttaagcacttattgtgcacaagccgaacattatgtaccttattgccactaactaggtactattatctccattctatagatgataaaatgttaagtaacttgtctgagtttgcacagctattaagtacaagagttgggatttcaacccatgtctacctgacttgggagcctaaattcctaaccactcgcctctgctttatcatcatagtctttaacaccactgctatgtgaactcctatgactacatgcttgctgtctcgcacagaataaccaaacagtagtctccacacttcaggtaatctatcctttgttcaacccagattctcttgcatttgtaaccttctgacctccccggcaaggtacccatttgcatttgcacatccccacactaacatgcagtgaaatagtctcttagccactctcttcagtgctcctcagagaggtgacaatcatcagtaactgtgaccccattgagagtgtggtttctgaccacgctcaagattatttgctgcaattgaagcagttagtagttgcttattcttttcttttccttgtttgcagatacctatgaaaatggaaattattttttggcaaactttatagcagctcaggtaagactaatttactacattttacaaatcttttcccaggtgtctacagattaaacattacagttaactgcgtaaatgtaatatcccacatcttaataggaggttcttcttgcctttacttttataatccaggtctgttgtcattaaagtaaggaagaaacaatccttactttggcagttttccagtatactatctccatgaaaagaaacttggaattcatacaatgctggggaaaaaatggggccttaaatgtgtaacatgttttccaaagatgagaaatttactagctgataaattttgaaagaaaaatgctatataagctacttattatgcaataatgcataaaagacgacctcaaaaccttagtggtatctaacaataagcacttacttagctcatgagcttgcagggctcagaggatgtgggtctggtcttggctgatctttgctagctcacatacatctccagttagtcttgggtctattgggctgtttagataatcttggctgtattcacatatctggggggtcagctgactctcatatgatttatcatggccttgtgggaaggtctaggcacggcttcttcataattatggaagagggctaaaataaaaataaaagtggagatcccttagttctttataatttttttgtatcgagttgactaatttcccattaccaaagcaaaatcacatggtcaagcccagagacagaggagggacagaatgcctcaactggagtgggagggcattgcaaaactgcatggaaaggggtatggatttgtaagggttgaatatttcataacagtgatgcaatcaatgcaccttgcatattaaatatcccattggtaatctacataattttaattagagtatgaggagaatcattctaggtcaaactggattctgcttctctatttttacctagtcactttaaccaagaagtaatatagcacaaatctattttttttctataacagtgattcacatatttgaagatgtctctcagttatttcttttgtcttcttagaattatacatcaccaggctaacttcatattttctctatttcctgcttatagtggtttccaggtctgatcattctgtttagactccagttaacttagatttcttttaaaacatcagaaccgagagcatattttagagctgtctatccagtatgatagccactagccacatgtggctattgaacacttgaaatgtgaccagcctaatttgaaatattcaaaagttagcttaaaaaattcaaaaatgatttgtgggcttcctgggcaagatggccaaataggaacagctctggcctgcagctcccagtgagatcaatgcagaaggcaggtgatttctgcatttccaactgagatacctggttcatctcactgggactgattagacagtgggtgaagtccacagagggcgaggagaagcagggtgtggtgtcacctcccccaggaagcacaaggggtcagggtactccccccgtagccaaaggaagccacgagggacagtgctatctggcccagatactacacttttcccatggtctttgcaacccatagagcaggagattccctcaggtgcctacaccaccaggaccctgggtttcaagcacaaaactgagtggccgtttgggcagataccaaactagcttcaggagtttttttttttcataccctagtggtgcctggaacaccagtgagacagaaccattcactcccctggaaagccagggagccgagtgcccttgctcagcggatcccaaccccacagagcccagcaagctaagatccacaggcttgaaatactcgccgccagcacagctgtctgaagttgacgtgggaagctcgagtttggtggagggaggggcatccgccattactgaggcttgagtaggcggttttcccctcacagtgtaaacaaagccaccaggaagttcgaactgggcagagcccaccacagctccacaaagccgctgtagcaagactgcctttctagattcctcctgtctgggcagggcatctctgaaaaaaaggcagcagccccagttaggggcttgtagataaaactcccatctctctgggacagacacctgggggaaggggctgctgtggatgcagcttcagcagacttaaaccttcctgcctgccagctctgaagagagcagtggatctcccagcacagtgctggagctctgctaagggacagactgcctcctcaagtgggtccctgacccccgtgcctcctgacagggagatacctcccagcaggggtcaacagacacctcatacaggagagctccagctggaatctggtgggtgcccctctgggatgaagcttccagaggaaggagcaggcagcaatcttaactgttctgcagtctccactggtgatacccaggcaaacatggtctggagtggacctccagcaaactccagcagacctgcagaagaggggcctgactattagaaggaaaactaacaaacggaaagcaatagcatcaacatcaacaaaaaggatgaccatgcaaaaaatccatccgaaggtcaccaacagcaaagaccaaaggtagataaatccacgaagatgaggaaaacccagtgcaaaaagcctaaagattccaaaaaccagaatgccccttctcctccaaaggatcacaactcctcaccagcaagggaacaaaactggagagagaacgaatttgatgaactgacagaaataggcttcagaaggtgggtaataacaagctcctccgagctaaaggagcatgttctaacccaatgcaaggaagctaagaaccttgataaaaggttagaggaattgctaactagaataaccagtttagagagaacataaatgacctgatggagctgaaaaatatagcatgagaacttcgtgaagcaaacacaagtatcaatcactgaatagatcaagcaaaagaaaggatatcagagattgaacagcaacttaatgaaataaagcgtgaagacaaaattagagaaaaaagaatgaaaaggaacaaacaaagcctccaagaaatatgggactatgtgaaaagaccaaacctacatttgattggtgtagctgaaagtgacgaggagaatggaaccaagttgtaaagcacacttcaaggtattatccaggagaattttccaacctagcaagacaggccaacattcaaattcaggaaatacagagaacaccacaaaaatattcctcaagaagagcaaccccacgacacataattgtcagattcaccaaggttgaaatgaaggaaaaaatgttaaggtcagccagagaggaaggttgggttacccacaaagggaagcccatcagactaacagcagatctgtctgcagaaacctcacaagccagaagagaatgggggccaatattcaacattcttaaagaaaagaattttcaacccagaatttcaaatccagccaaactaagcttcataagtgaaggggaaataaaatcctttacaagcaatccatttacaagcaaatgctgagggatttggtcaccactaggcctgccttacaagagctcctgaaggaagcactaaatatggaaaaggaaaaatgagtatcagctcctgcaaaaataaaccaaaatgtaaagaccattgacactatgaagaaactgcatcaactaatgggcaaaataaccagctagcatcataatgacaggatcaaattcacaaatagcagtattaaccttaaatgtaaatgggctaaatgctctgattaaaaggcacagactggcaaattggataaagagtcaagacccactggtgtgctgtattcagaagacccatctcatgtgcaaagacacactaggctcaaaataaagggatggaggaagatttgcccatcaaatgggaagtaaaaagaaaaagcaggggttgcaattttcatctctgataaaacagattttaaaccaacaaatatcaaaaaagacaaagaaggccattacataatgttaagagctaactaccataaatatatatgcacccaatacagaagcacccacattcataaggcaagtccttagagacctacaaagagacttagactctcacacaataatagtgggagattttaacacccactgtcaatattagacagaccaacaagacaggaaattagcaaggatattcagaacttgaactcagctctggaccaagcagatgtaatagacatctacagaactctccaccctaaatcaacagaatatacattcttctcagcaccaatagcacttattcgaaaatcaaccacataattggaagtaatacgctcctcagaaaatgaaaaagaacagaaatcataacaaagagtctctcagaccgcagtgcaatcaaattagaactcaggattaagaaactcactcaaaaccacacaactacagggaaactgaacaacctgctcctggatgactactgagtaaataatgaaattaaggcagaaataaataagttctttgaaaccaacaaaaacaaagacacaacatatcaaaatctctgggagttttcagagggaaatttatagcactaaatgcccacaggagaaaacaggaaggatctaaaatcaacaccctaacatcatagttaaaagagctagagaagcaagggcaaaaaagttcaaaagctagcagaagacaaaaaataactaagatcagagcagaactgaaggagagagagacacgaaatacccttcaaaaaaatcagtgactccaggagctggttttttgaaatgattaacagaatagttagaccgctagccagactaataaagaaaaaaagagagaagaatcaaatagacacaataaaaaatggtagagaggagatcaccgctgatcccacagaaatacaaactaccatcagagaatactataaacatataaacacctctatgcaaataaactagaaaatctagaagaaattgataaattcctggacacatacaccctctgaaggtaaaaccagggagaagttgaatccctgagtagaccaataacaaggtctgaaattgaggcactaaattaagagcctaccaaccaaaacagcccaggaccagacagattcacagccgaattctaccagaagtacaaagaggaactggtaccgttcctcctgaaactattccaaacaagagggactctgccctaactcattttatgaggtcagcatcatcctgataccaacacctggcagagacacaataaaaaaagaaaatttcaggccagtatccctgatgaacatcaatgcaaaagtcctccataaaatactggcaaaccgaatccagcagcacatcaaaaagccatgatcaagttggcttcatccttgggatgcaaggctggttcaacatatgcaagtcaataattgcaatccatcacataaacagaaccaatgacaaaaaccacatgattatctcaatagattcagaaaaggcctttgataaaattcaacaccctttcatgctaaaaacactcaataaactgggtattgatggaacaaatataaaaataatatgagctatttatgacaaaccaacagctaatatcatattgaataggaaaaagctggaagctttccctttgaaaaccggcacaagacaaggatgccctctctcaccactcctattcagcatagtattggaagttctggccagggcaatcaggcaagagaaagaaataaagcttattcaaataggaagagaggaagccaaattatctctatttgcagatgatgtgattgtatatttagaaaaccccattgtctcagccgaaaatctcattaaggtgataagcaacttcagcaaagtctcaggatacaaaatcaatgtgcaaaaatcacaagcatttcgatacaccaataatagacagccaaatcatgagcaaactcccactcacaattgctacaaagagaagaagatacctaggaatacaacttacaagggatgtgaaggacctcttcaaggagaactacaaaccactactcaaggatataagagaggacacaagcaaatggaaaaacattccatgctcatggataggaagaatcagtatcgtgaaaatggtcatacttcccaatgcaaatcaaaaccacaatgagatatcatctcatgccagttagaatggccattatcaaaaagtcaggaaacagcagatgctggagaggatgtggagaaataggaatgcttttacactgtcagtgggagtgtaaattagttcaaccattgtggaagacagtgtggtgattcctcaaggatctagaaccagaaataccatttcacccagcaatcccattactgggtatatacccaaagggttataaatcattctgctataaagaaacaggcacaagtctgtttactgcagcactgttcacaatagcaaagacttagaaccaacccaaatgcccatcagtgttagaccagataaagaaaatgtggcacatatataccatggaatagtatgcagccataaaaaagaatgagttcatgcccttttcaggctcatggatgaagctggaaaccatcacactcagcaaactaacacaggaacagaaaaccaaacactgcatgttgtcactcatatgtgggagttgaataatgagaacatatgggcacagagaggggaacttcacacaccagggcctgttgggggtggagggcaaggagacagatagcattaggagaaatccctaatgtagatgacgggttgatgggttgatggatgcagcaaaccaccatggcacatgtatacctatgtaacaaacctgcatgttctgcacatgtatcccagaacttaaagtataattaaaaaaaaaaaaaaacatttggctgagcgtggtggctcatgcctgtaatgccagcactttgggaagccaaggcaggtggatcacctgaggtcgggagtttgagaccagcctgaccaacatggagaaaaccctgtctctactcaaaatccaaaaattaggcgtggtggcgcatgcctgtaatccccactacttgggaggctgaggcgggagaatcgcttgaacctgggaggcagaggttgtggtgagccgagatcgcgccattgcactccagcctgggtagcaagagcgaaactctgtctcaaaaaaaaaaaaaaaaaacctcatgaataactttatattgaaaaatgttgtaataataacattttggctatatcatgtaaataaaatatattttgaaattaatgtaccctttttcttttcactttttaaaaaaatgtgactactagaaaatattcaattacatatatagtttcccttatatttctataagatggcatagacttccatgttgcctactacctctttttagctagagtctatattttttctgctgttattacattgtgttattttttaacacatgtatcagatgtttggcacatataaatctcatggtcagctaagaccttcaaattattctcatagacatgattatcaggtcatattgttccatcctgcatttggcctctctgaaactaactgctagactttgtatactaattaaatttgtgtattctctgcccttaagagtagttgggttgaagactctacatattttttcctctcaaatattattttaatgaatattattttaatgatctggaagtcctgaattttagttctatttctactgctattattcaaattcggagagacactgtttaatctgtgttttttaaaaaattgtaaaacattagattgccctttaataacatctaacttcaaaattccatttttctgataaatgaattcttatttctgtgatgtttgatagattatttccttaagaataaggggcctgaaatgaaagaaagatcgcaactttccttaggggataactattatcagcggtttcctggttggtaaaccagcttgtgggggtgggagatgatttgtaacatttgctaatttctgtagtgtagcttctcccaccatcttaaccaatttcaagcatcagctggcttgcaaaattctaggaaatttaaaaatcaactctctcaaatcaataagaactagctttagtacacccatttattttgagctgtatattttttccttgattctgcctgcccagtagcaaaagtcttgttcatccttcatgatgccaattgaacatgtttcttttttctcttcctactgcagccatcataattgagaaatgcatagcttccctctgctacaactatctccttgattattgcatgtaatcttcaaaatctttccttacatacctaactggcctcacgtctctgtttgctcagcaccagctatggttgtccttgcactcctccatgaatgtggctttgttcaatgtgtccctgtacccctatttcctgtctcataataaatccttcccatgattaccaggagttccgaagttacatgtccttcctaagttctctcttgaccctcttcctcccatgtaatttttcctttctcttcacatccatgaaaaatatccactatgattttcatttgggccttcatcatgtgccacctcataatttatgtcatattattttaacccttgtattgatacttaaacaattcatgatttggttaacttcctatgtttcttgcacactgtcctcagtctagggactgtttgccacacttctttgttcactctaaattaacttgtgcagtactatgtacaggggcaccttgcgcttccaactttacctatgttatctagccttgtcgctttggactactcacttcattttccagagcctcagtttccttatctctaagatagcaataatgatattttcttttcaaaatgattataagaatacttatgatatagggaaaataactttcataatgctggtacaataaacttatttgtggcattacccaatttattatagcaggtactcaggaagtatgtcttcatgaagtgtgtggagagtagaattatagtaaccagaggctgggaaggggtgggggccataaagagaggttggttagtgggaacaaagagacagttaaatagcaggagtgagttcttgtgtttgctaacatactagggtgatgatagttaacaacaatttattgtatatttcaaaatagctagaagagaatatttgaaatgtttccaacacgaagaaatgatgaatgtggcttggtgtggtggctcacacctgtaatcccatcactttgggaggccgaggcaggaggatcacgtggtcagggatttgagaccagcctggccaacatagtgaaaccccgtctctattaaaaatacaaaaattagccgggtatggtggcacacacctatagtcccagctgcttaggaggctgaggcaggagaatcgcttaaacccaggaggcggaggttgcagtgagcccagaccacgccattgcactccagcctgggtgacagagtgagactccatctcaaaacaaacaaacaaacaaacaaatgttgactatttgaggtcatggatatcctaaataccctgatttgatcactacacattgtatacatgtatcaaaatatcacatgttctccataaatatgtataattattatgtatcaataaaaatttaaatacataaatagaaatagcaaactaatataacaaaagtaaatttaggtttgttaatattttaatatggaccatagtctatcaacaatatgttatgtattcttttctctttataaattctttatagaacatcctgcaaatccagaccatacacaataagtatttgagtgactcgaatccactaaaagttgggtatattagaatctggggtgtgaatacctatgtgacacaagtcagtttcacctatgacaaccggcaatttatggagacaaatttcaagagtgaaccttataatcaggtaggtctgaaaggaatattagcatatcacaagtaaattttatcattctgcaaaattatcaccaataattttgctaacaattaaaattatcattgttaaattttcatgtattagatggttataaatacgtgcaatagatatgttcctgaaaagttgcaaatgttgaatcatattgtaaaatatgcaacattaatggtctttccagtatggcctaggggtcagtgatcactggcctgatgagatcctctccatgtatttaccaaagagactgtgctatgttttgataggttagtcttccacattagcaaaataaaacttatttctgctgcagaggctaaaacaaaggaaagggtgattccctaaagctgttgaaggttgcccccatgcttcctgcagttattcatgtccctggtcaaattgatggatcttataggtagacgaaaattggcagtaaactgtggtaatcttcgaatgaatacatcccacctgtggtataggataaaaggttgataaaacagggggacataaatagcaggccctactagaggattctagaatcaactaaaccagaattttggaagatgaaataccaatagttaccaaaggcaaccacaaagaaaaaagtatctcacttttagaacataagacaacataaatacggaaccagcaacccaaaagggatggtttagaaaagtgaaaatggataaccatagttcttgttttctaaaacgtgaaatgagtgccctgatggtatttggactttggaaaatggcccctctgagcactcaaatagatcttctccctctaggctcttctgggtatttaccttaaagcattttacctggactattgagttcaaaaccactctttgcaagtaattgcttctagttaagattgtgcagaaaatccttgaataccttctttttaaaaactctatggcatatctgatgcctattatgtgccagacaccatactgtttgaaatgaggaaaacatgaaaccaacctgctgtcaagaggactaaaacccaatggcaaagcaaagagattttaataaatgttggttttaatcacagctacaaatatttgtaaacaataaggttctgactaaatgaagtgaaaagaaaagatttccagcatagggattatgcacacagagcatctctctgtatttatctgaccaaaatcaacatgacctaacccaaaaaggaatgtttatatcctattactggaaaggaatgaatccatcattttttgttaaattgtaatttaagaggtgagctacatgtgaggtttaagaagttctaaaatacccatttatatctcttcttttctggcagatactaactattcaattgactgacaagactatcaacctggaaaagttaactgaggttacttggattgatggtggtcctgtacttcctactccaactaagacaagtaccatcccaatgagttctcatccttctccatctactaccaatgccaccagttctgagacaatcaccagttctgccagtgcaaatactaccactggcactactgatactgttcctatcacaaccacatctttcccaagtactactagtgttacaactaatactactgttcctgatacaacttctcctttccctacaagtactactaatgctagcactaatgctactgttcctatcacaaccacacctttcccaacaagtactattggtgttacaactaatgctactgttcccaatacaactgcccctttcccaacaaatgctagtactgctagcactaatgctactgttcctatcacaaccacatgttttgcaacaagtactattggtgttacaactaatgctactgttcccgatacaactgcccctttcccaacaaatactactactgctagcactaatgctactattcctatcacaaccacaccttttgcaacaagtactattagtgttacaactagtactactgttcctgatacaactgctcctttccctacaagtactactagtgctagcactaatgctacccctgttcctatcacaaccacactttttgcaacaagtactattggtgttacaactggtactactgttcctgatacaactgctcctttccctacaagtactactagtactagcactagtgctactgttcctattacaaccacaccttcccctacaaatactgctgatgctaacactagtaatactgttcctaataccactatgccttctcctacaagtagtactactgtgagtactattgctaccgttcccatttcagtgactccttctctgacaagtactgctgatgccaccattagtactactgtacttattgccactacttcttctctaacaggtactactgatgttagcactagtactactattaataatataagtactcctgttcaaacaaatactactaatgctagcactagtactaatgttgctaatataactgctacctctcatacaagtactgatgatactgttcctaataatactgttccagttacagctattccttctcttgcaaatactggtgttgacactactagcaacagtttttccattatgaccacttctttctctgaaagtactaatgctatgaacactactgttattatggcaactacttctcctacaagtactgatgttgctagcacaaataatgatgcttctatgacaaattttcttttagctacaatgtctgctggtaatataactagtaatagtatttccataacaactacttcttttggtaatagtgttccttttgtgactactccttctccaagtactgatgctactactacaagtaataatactaatcctggcatgactacttattaccagacttctcctaccattcctacccatactcttacttctattcctagctctattacttctattttgagcatgtttccaacaagtaatacattcactactgataaaattactaattttactacccctacaaatgcaaacaccattattttcaacactcttgatacaaaaagtaccatggtaatagatgctacggtcactactaccagcaccaaagataataccatgagtccagatacaacagttacttccatagacaaattcaccacacacatcacacagttcgctactccccattctgctactactacaacactggccttaagccacacctcattagctcctacaaatctttctaatctaggcaccatggatattactgatgcagataactccagcagtgttacaggtaacacgacacacatttctgtttcaaatctcacaacagcctcagtcacaataacagccactggtctagattcacaaactccccatatggtaataaattctgtggctacttatttacctattactgcaactagtgctaccacagatactacaaatattacaaaatatgctttaaatactaccactcctgatagtacagtacatacctctgctactgcacctacttatattgcaaatgccataaatgctactcaagttccatgattactactcaaggcaggatagttacctcagataacgcctacaaacaactattacagatatagaaaatcagttacgagacactctatctatcttatgctacttaagttttcacggatattagtactctagccataaaagacacagctactccaaacactctcgtcattgcagacatgtttaggaaggtttacaaaccttataggtttcaccaaagaagctgtgggtacttattttgcaaccatagtatgtgctcttattcttttaaattatagttattactcctataacctcatcagttaaactacagatgttttatatatcctatatatccttgctacagatttcacaggtaattttggtatctcagataacaccacattaggctctgtaaatactattgccttagatttagttactgaaatagcccaacttgtttcttgggtcacatgacgtaccataactgagagtactggtgatacccccagcactcaaatggtttctataccaacagttattgatattacaggagagtatgtaattagtaatgctaaaaaaatgcactttattatcctatggacttttccaaatgccatagctaccaatagagtcatttgcattacacatactaatagtattatttcttctgaggagatcctagctgtagctacagatatagaaaattctaccattgaagatcttgtataaccttacttcagccactgaaataatttaaattataaatattacatgtgggtttgactatcacagaaaataaaatgattatagatcctaaaaacataaattcctgaactttgcaaccattaattcataggtactactaatactcttactacagattttataagtacttccacttatagacagaagagcattctcagaaaattagaattaatctaaattatgagatagtcttaaagcctcactgttaccaccaatgactggctctgactctagtataaatcagaaattatccagacagaggtgagaatgtaaatatacagcatgaggaagacagcctccacattggaatcagagttcataatcttatttgcattttcttctattaatacaagcttttcccttataatttcactgttcagactccccttcattgtgttagggttttcagtctattcctggtttttcatatccaaattcatcatccatccttgatccattgttttcttagatcactcaaacccccatgagtagacccatggtcattaccaaatctggtcatttgggtactattgtaggtttaaccctagggcaatattctcgaagtttagttcagggatccatggggttccccaagactttctggagcacacagcttcttcaaatctactttcataatgatgctaagttatttgttttttcagtctcattgtctcattagtatatagtggcactgtccagatgctctatgctgtattgtgtcataaaagatgaatatagaaaaagaaaaaagaatctagctgtattctattaagctagacattaaacagatttacaaaatgtaaaataatgtcattcttctaatttttttttgctttgggaaatacagttatttttcattaaaaacatatttatgttatcacaaagtgaatatgttattttttatgaatgaaaaataaatatttaaaaaatattttacaaatgactcaattttgatttctaatgcagtaaatattagcagatataacccacataaataaagcacagtgccctcaccaattttgaatgtaaaggggttctgagactaaagagtttgagaacaacttcctttaagtgggcagaaacatcgtatttccactctcatgtcctggtcaagtatattatcaacttccccagcatgtaggtactccagcatctgtggcttactcaacatgaatatctttccactgtctacaaacacatctacccagctttttgatctgtcagcccagctgtactattgtccagacaatttgatggtactccagatgaggggcacagattcatcagtcagcaacatttgcttttggaatctgcccacaagctacagtcctctgaacaaagttgatagaccttattcttgtgtatacatgactcttgaccttcccaactcaaaacaaaactcaaaattctatgggcttggtcagactccctcacttgtatctttactgagggagacttagtgcatttgtcttcttggcatcacaaactctgatacaggacaaagtgctctgtgtgatagggcaccatgagattctgctgccaggccaccatacattgctcattcactgaccaacaacttcattaaagcagctgggatttggaaaactgaagatgaatctgcttgaacaagcatagttctgaagccaccaaagtccaacctcttaagtacgtaaatggaacataattgaaagcatggaattttgaaaaggtaagaaatactttgaatatacaaaagtcttgactttggtcagatgtttgaaaagacttgagaattgaaactcaggagtcaatgcacaagtagtggtcctggaaccaggttcagaaaacatgagggcaatgttgacatgctaattctaccattgacaacactagcaaaacctgtgcatggactctgatttataaggtctagagaaacttctaagctccataatgactggccccgctgggtcacccacatgtgtgatattaattctgcactaatgattataacttatgttctaagtataaagaaatttacttttctacacttctggtacttgacacattcctacctttaccattactgtggacatcattatttttacacctaaaatttctagttattaatttaaacttcagtttctagtattccaagcatcgctatgtaaacactattcatgttgactatttaagagatgtcacacatactgcatgattaattttccagtgaggaatatagatgacagatgttttggattaacaggaaactcactgggagtctaaaggtatttaggaatacttcaaggagtaagggaagctgggaggtaccctgtagcacaaaaaagagtcaagaaaagctttcaggtggggaatgcactggacaaagagactgactttacatggtgtgattaggagatataaaatagtccactcttttctacagcaggagcattgtgagaagagacaagatttaaagtttatcaagttccatcaccaaacttccgtgtatatgagattagacattcaaatgagggttgaaagagcattcataccagtaaaggaacttacagggctagagaatgctttggtttccacatccctttccccatgggagagtggagtggtgctctgtgtgaagggcactgcagaagaagtgctcgatggagattaagagtgcctgtgaggagctgggactggcatctcactcccagctgggcactcgctgaactgagaaactcttgcctctcttccccatcagatgatacagtggagcatggagcatgggcaaggtttcagaaacctcatcatgcatctcccagagtgtggaagccaatgaaatcacaaagaatggcgctagagtcttgcccagagaattccaaaagtggcagagattggagaccctgcagtagtggatgcagagccagggaagtagtggtgcatcctggactcaacagtgttcaatggacaaggaagctgaagctcctcaggtgggtgtggggagatggctgggctagggctgtcatgaagcaatctgtccagtggagaagggactctagtgatgagaggtcgtggatggacttccaagagtggaaactaagtttgtagtggggagaggtcaaaataggtcatgcagattgcatctcacctcatgttagatgctgcacaaggggcctctgaaaaactcactaatgtgcccatgggaagaaatcagcactggggtcctctcacactgagggtacctgcggatgccttgccatagcatccatcacatgggaacctttgtcttttcctttaatttccatctggctgtgaaggatacccagaaacagtcaaggaagaggagaaggagaatatggaagtgtaaaagcatagaccgtaatccccttcctcactgctggaggtggtctctgcggaaggagaaaacttgacatggatgtgaaaatgacataccgatttagatgatacaaattcttgaaaacttccaaatgaccagaaagtgatgaggtctgttgacgggataagaaaagaatttcaactcagcattgaggaagaggggctaagattaagaaaaaatgaaaagcttgagaatgctgaaaagacacacactgcctcatttcacattgctcttacctgttagaatgatgggtgaacattcatccttaactttgtaatgctttataaatctcttattccaaggaaaagtggagaatggcttggagtacaaaagttagatctgggccccaaaggacgtttgaggttttctcaccttagccaatctctggtggcttcagagaaggtggctttggaaattttttactatgtaattgagaaaagtttggctcaagagaagaagtaaaggggtctgtacaacctatgggtcttgttacttaaaaacaacttcttatatttgcacaataatccatagtttgcaaagggcctcacataaatgttttattttgttccactcctgctgtgaggcagagagggaagaaatctttacactttttttctcagaggcagaaaggaagacttagaaaggttaaatgacttcttcaagaacacagagtcttaaaacatagtagagcttggccttctgattcacttcctattacccgtctgcttcagggtcccatctcctgaggaaagtccatctttgccatgatgtgatgaactaaaataaaataaacaaaaacccacttctagaaccaaataagtcttgtaaaagagtcctgatattattcctatctatttacgtgacctggatcaacttgcttgaattatctgagccttatttaattccttcattggtaaaatggaaggattgagagagtgcctaggaaaatatctagtgtagcaagaacccataatttggtattctttttggcatatcaaaacatcttgtaaccttgaatatatacaattttcatttgtcaattatacctcaataaagctggaagaaaaaaaaagagctgactactctattccttactgctaatacaccaagatgatacgtctggcttcctaggtcctctctcccaaattcttccctttttgataataattttaaaatgaacaataaatagataagttgtggtgaggttgccaatgtgttagaaacattgagtggaacttacgaaaaggaaccccttatgaaagttgtaagattcaaaatggagtcacttgtgccaaaccctggcaaaatagagttggggaaggtcctgaagagagggctctcacacaatttgtctgataacaggaactatcacaggacatttttccaaactgcagctttttacatgagtcacgccaagacagctagctgcctacacaagaatacttgcctgacacactgtctcacaaacctaatccctgcaagggagctacagtaacttccaggttacaaatcccacctagcaactatagactgttgccaatcacaactcgccagctcttgtaagacactgctagtgccaatgaactttctttcaaaacgacttgcataaccttctctttccccaataaaactctaatgtttttctttgttctctggatatagcagaggccaccctgttgtgcctgtatcccaaattgcagttctgttttcacattttaattccaaataaaagttctgtgctttgggaacatctctacattttttcttggaagttgacaccctttaactctgcctttgctttccttcttaccctcttttgctgggtggaaatgtggagtcagacagtagcaatagtgagttggctctagatgcccacaacaccttggagggggagctggagagcagctctgcatgcagaaagtaggtgtgggcggagtagctctgtcatgtgcctccacacaggagtgaagctt

SEQ ID NO: 97 - DNA, 170837 bp, Homo sapiens
gaattcaaaatagaaatacaaaattacatataaaagtaaatatttatggccaggtgcactggttcacacctgtaatcccagcactttgggaggccgatgcaggaggcttgcttgagctcaggagttcaagaccagtctgtgcaacatagtgataccccatctctacaaaaaagttagaaaaactagctgggtgtgggatagtcctagctagctgggaggctgaggtgggaggatcacttgagcccaggtgttggaggctacagtgggctatgattgcaccactgctctccagcctgggctgcagggggagaccctgtctcagaaaaagagtgaaagtttatttagattgaaatatgaaatcgtaacaaattacacatttttgctctttttttttttttttttttttgagataagatctcactgtgtcacccaggctggagcacagtggcactatcatggctcaatgcaacctccacctcccaggctcaagtgatcctcccacctcagcttcccaagtagctgggaccacaggcacccaccaccataactggctgatttttgtattttttgtagaggcagggttttgccatgttgcccaggctggtctcaaactcctgagctgaagagatccacccacctctgcttccataagggctgagattacaggcgtgagccaccgtgcccggccacacatttttgaaaagtgacaaacaccacaaatataacaaaatcctgaaaaatgacataacctctacaatattttttcctattctttggctgcatacttttcatatgatcatctcgtcacataacaactgtgcaatatcattttcatgtaaagaagacaaagcaattcaaatgcattttaaaatgccattatgttggatagagctacataattgtttaattgaattctccctctgctgtgtacaataacttatggatgaatatgcttgggagctttgtgacaagaacacttagggtgctttgctgtgattttagtgcttttgaatgtttttttgtctggtgttgccaggtttcatcaggacaagttatatcagatatgctaagactgactcaatatgttggtagacataaaatgcagtttggcatgcataaaaatgatacttcacagtttatagtattgctacagctttgtgctctacaaacacgagaattctaatcaattctattttgcattgatttctactttaaaagtatgatagtatggtgcattataattgtatataccacatttctgagtattttcctgaagataatttctgtcttgactagacatcaatgagaaccaaatatttcactcataattgtgtacagctgatgattgaaagaacattccacagattagcttctcattctgcacattttaactcttgcttcttcttcactcccacatgcttccagtgtcaggcatcataggaaacatttaaatcataataagacccatgatgccacagagcatgcactgagcaagagggttcctggaagcctagaatacccaagaataaccaacaatttctcgactctacatggaagtgtgaaccatatatatagatcccactcgaccaaaacaaataaatctccaactcaacttctccttagctggattccccaaaatgctcatgcctctccatcaccacacaactcctcaagggaaaagtgacgcaggggcaaacagagtcaacagcatccttagcttatgacagttaaaatcttacttttacatttttaccaaaagcatgtgaccatgtgaacccaagcaaaggtgcttctgggatcttggaagtcattcttataactagcaggtcctaaagcttaagctcctttctagaaaatctactctgattgtggtgaagacgaccattgcaacaagagccacgctcacggagaaagcagtgcgtactggagttgtcaagaaaaacttcttgtaggagacaggcactgagcaaggccttaagtcattggtaggatccaacaaacagaggaataggatgggagtctaagccacaaagtttctgcatctgccaaaaagtagatatgcatgtatgtggatgtaaaacgtgttttcctgccaatgaaaacatttttccgtcactggcttagagctacctaataagagccaatggcaatacatttacacatcactaaagaatgagaagtgaactttcttcccggtcccctctccccatcaccatcagcaaataatcactcccaagccaagattaaccagagctgcaggcatttggcacacatgtggtccccatccacctcttccaacctgggatccaaaaaccctggatttacaccccaggcaaaagagagactggcctgagactaagtcttcggtggtagatgcaggaagcaaagcctggtggatgccagtccaatcagcgtgaggaaggaagattcatgcccagttctcacccctctttcgcttgaatatattttgtgccattacctgcaggaaagggggaagggaaggaatgtttcccgccagaggcagcagctgtcccctcatttggaagactctgagttgattttggccatgtccttctgcctgtttctttaacatgctgcattaagcctcagctttgctcctcttgctcctgaattctgttttgaaatatcagagaaatgctcccaggaggactttgaatgtgagcactctttataggctattttaaggagctcccagctcaggccagggtcaggcaacaacagctaaacccaaactcatcagcaccatggtctacccaggaaagcacaaagactcaaatgtcactgagttcaccaccattcgtttagcacctactgtatgccgggagtgctcttagaaattagggtgataatcctaaaccaaaagaacaaagctggaggcatcatgctacctgacttcaaactatactacaaggttacagtaaccaaaacagcatggtactggtaccaaaacagagatatagaccaatggaacagaacagagccctcagaaataatgctgcatatctacaactatctgatctttgacaaacctgacaaaaacaagaaatggggaaaggattccccatttaataagtggtgctgggaaaactggctagccatatgtagaaagctgaaattggatcccttccttatgccgtatacaaaaattaattgaagatggattaaagacttaaatgttagacctaaaaccataaaaaccctagaagaaaacctaggcaataccattcaggacataggcatggacaaggacttcatggctaaaataccaaaagcaatggcaacaaaagccaaaattgacaaatgggatctaattaaactaaagagcttctgcacagcaaaagaaactaccatcagagtgaacaggcaacctacagaatgggagaaaatttttgcaatctactcatctgacaaagggctaatatccagaatctacaatgaactcaaacacatttacaagaaaaaaacaaacaaccccatcaaaaagtgggcaaaggatatgaacagacacttctcaaaagaagacatttatgcaggcaacagacacgtgaacaaatgcttatcatcactggccatcagagaaatgcaaatcaaaaccacagggagataccatctcacaccagttagaatggcgaccattaaaaagtcaggaaacaacaggtgctggagaggatgtggagaaataggaacaattttacactgttggtgggactgtaaactagttcaaccattgtggaagttattgtggcaattcctctgggatctagaactagaaataccatttgacccagccatcccattactgggtatatacccaaaggattataaatcatgctggtataaagacacacgcacacgtatgtttattgcggcactattcacaatagcaaagacttggaaccaacccaaatgtccaacaatgatagactggattaagaaaatgtggcagatatacaccatggaatactatgcagccataaaaaatgatgagttcatgtcctttgtagggacatggatgaagctggaaaccatcattctcagctaactgtcgtgaggacaaaaaaccaaacccacatgttctcactcaaaggtgggaattgaacaatgagaacacatggacacaggaaggggaacatcacacaccggggcctgttgtggggtggggggaggggggagggatagcattaggagatatacctaatgttaaattatgagttaatgggtgcagcacaccaacattgcacgtgtgtgcatatgtaacaaacctgcaggttgtgcacatgtaccctaaaacttaaagtataataataaaaaaagaaattagggtgatggagtagcttagggttccccaactcctcctttctttgcagatcataaatgtgattaccctcttttggtttcccctaagtttatgtttaataagcttgtaatttgtctttttcccacattccccatcaactctagaattcagccggcttagttcccaggtcatcctcagctgggtgggggtggtgattgctcacttgtgacaaagcatcctggcgctgattgactggctcagtgtggggtgtgaatggggtcctgaacacgggcaaacggaaagagatggttaagaaaccattaacaagtgccaagtcaaattcatttcagaatatagttaaagtaggaatctaaagtgctatctttgcagacagacaaaacccttgattgaataattcttgccttcccctccctttgcaatgatcacataatccatattgaattattgtgtacctttagatccacgtccagctctctagccagtctcacggtcttcatctttattgtgccaaaatcacatggctttaacttgcagggttggataatttcttctaaattccacctgcttccctatacccccttacccactcccttgaccttttctggaagataagaacaagttgaggaacttgcattttacataggaaagcaatgtttatggccctgaaataaggggcatgctcacagccagtattcaaaatgtcttgttgaaataagctcaaatacaatataaagatattaccaaccagcttctctatgaattactcactgctctacaaaaatgtttccaactttcccaacacacacacacacaaatctctactgttgcacaatcctgcttgtatttttcagattggcttgattaaaactgtgtgaagtaaaattcaacctgttgacctcactcaagatacctggaaatgaaaagttggccatctgagtcattggttttattttattttgggggggaaaataaggtgggagtgtaaatatcattagataaagtttccagaaatttaaagccatgaaggagagagatcaactgggatttagggattatttatttatttatttattttgagacagagtcttgttctgtcacccaggctggagtgcagtggtgcgatctcggctcattgcaacctccatctcccaggttcaagtgattgtcctgcctcagccttctgagtagctgggactacagatgtgtagcaccagaccaggctaatttttgtatttttagtagaggggtttcgccatgttgaccaggctggtctcaaactcctgacctcaggtgatccacccgcctcggcctcccaaagtgctgggattaaaggcatgagccaccaagcccgatctttttttttaattaaaattaaaattttttaaattctaaatttttgagtttagaagcacaaaaatatattctgtataataagctcacttatgaacttattatatttggcatttccacagatgtgaaagtttaacttaagaggacaaggcttctcccatccttatgtgggttgagagccaagaaaacccctaaaactcagtcttttctaatcaaacttttctgattaaaaaaaaaactctaaaattaagatgattcccaatgatccaatttaattctggatctttttcacaataggggaccctttgtcagctgtgacataaaccagtctatttccagcctgagccatctatgctgcctccttaagagtgaagcctgcctacactttgagaagctgaatacaaactgaaggtaactgagggatctctgggacctctgaaatcctggataactttctctaaggctggtttgtgattggagaaagggtacaaatggtgcttgccccagcagtgtgtctcaaacattgagatgcagtagaatcgtctattgaattagactgacctggagtggagcccaagtgaggaacttttttttttttgagacagagccttgctctgtcacccaggctggagggtagtggcaagatcttggctcactgcaacctctgcctcctgggttcaagtgattctcctgcctcagtctactgagtaactgggattacaggtgcaccaccatacctggctaattttttatatttttagtagaggtggagtttcaccatgttgaacaggctggtcttgaacttgtgacctcaagtgatccacctgcctcagcctcccaatgtgctggtattacaggtgtgagacagtgtgcccagccccaggtgggggaattctaacagattccctggatgcccccaagtctaagaagcccctactacattacagcctcctccaaggcagagaggagccttgtttcattcatttttgtatcatggggcttggcaacgtgccaggcacataataagctcttaagaaatacatcctaaattcatcagaactggtactaaactccaggtagaataaaaaattttaacatttttttttaccagaaaatatgtaatcggaatagcttctaaatactggcaaacaacaacaaaaggatactcttactttgatttcaaagaaaaaaaaataagaaaaaattcacaattggcattgctacaaactcaattgctgttaggaatcactaaaaacaagatactttcatcctggctaaagcaaaaacacatcaatcgctctgtttcacaaaagtcagagcagggggaaacatcagacaataaatagactttctgatatataatatttaaaaaagaaaaaagtcccccttgagactgcagccatgcctcagttctttcccgcctcgtcaccttcctttcttctcccctgctctttctcctgcttactcacttgccgtgctccctgccagtatctctctcctcatcctcagttgtcacacttttcttatcttctcaggagccattaatgactgactccaatggtatgagtgggcggtggaaaagatgaggccaggactgctgagagagcggaggaaacagagccatgggggttcctgaaggagccagaacttgagtgtgaataagctttagttttgcagaacgcagagggggagacatgctaacctagaacagcaatttgtaaacacgtccatgcctttaggaaacttactgtttaaacaggccttgtctatcagatttaattcagttaaacaaaatttcatgaatatagcagtgatggttaagaacattgcctccctagaaaaaactattttaggctgggcatggtggcttacacctgtaatcccagtactttaggaggccgaggtgggtgggtcacctgaggtcaggagttcaagaccagcctggcaaacatggtgaaaacccgtctctactaaaaatataaaaattagttgggcatggtggtgggagcctgcaatccaagctacttgggaggctgaggcaggagaatcacttgaacctgggtggcggaggttgcagtaagccgagatcatgccattgcactccagcctgggcaacaagagtgaaactccatctcaaacagagagccaaatcatgactgaactcccattcacaactgctacaatgagaataaaatacctaggaatacaacttacaagggatgtgaaggacctcttcaaggagaactacaaactactcctcaacgaaataaaagaggacacaaacaaatggaagaacattccatggtcacagataggaagaatcaatatcatgaaaatggccatactgccgaaagtaatttatggattcaatgctatccccatcaagctaccattgactttcttcacagaattagaaaaaactactttaaaattcatatggaaccaaaaaagagcccatatagccaagcaatcctaagcaaaaagaacaaagctggaggtatcaccctacctgccttcaagctatactacaaggctacagtaaccaaaacagcatggtactggtaccaaaacagatatatagacgaatggaacagaacagaggcctcagaaataacaccacacatctacaaccatctgatctttgacaaacctgacaaaaacaagcaacaggggaaagattccctatttaatagatgggaaaactggctagccatatgcagaaaactgaaagtggaccccttccttacaccttatataaaaattagctcgagatggattaaagacttaaatgtaagaccataaaaaccctagaagaaaacctaggcaataccattcaggacataggcatgggcaatgacttcatggctgaaacaccaaaagcaatggcaataaaagccaaaattgataaatgggatctaatgaaactaaaaagcttctgcacagcaaaagaaactatcatcagagtgaacaggcaacctacagaatggtagaaaatttttgcaatctatccatctgacaaagggctaatatccagagtctacaaggaacttaaacaaatttacaagaaaaaacaaacaaccccatcaaaaagtgggcaaaggaaatgaacagacacttctcaaaagaagacatttatgcggccaacaaacatatgaaaaaaagctcatcatcactggtcattagaaaaatgcaaatcaaaaccacaatgagataccatcttacgccagttagaatggcagttattaaaaagtcaggaaacagcagatgctggagaggatgtggagaaataggaatgcttttacactgttggtgggagtgtaaattagttcaaccattgaggaagacagtgtggtgattcctcaaggatctcgaaccagaaataccatttgacccagcaatctcattactgggtatatgcccaaaggattacaaatcattctactataaagacacatgcacatgtatgtttattgctgcactattcacaatagcaaagacttggaatgacccaaatgtccatcgaagatagactggataaagaaaatgtggcatatatatgccatggaatactatgcagccataaaaaaggatgagttcatgtcctttgcagggacatggatgaagctggaaaccatcattctcagcaaactaacacaggaacagaaaaccaaacaccacatgttcttactcataagtgggagttgaacaatgaaaacacatggacacaggaagcggaacatcacacaccagggtctgtggggaggtgggggataggggagggatggcattaggagaaatacttaatgtagatgacaggttgatgggtgcagcaaaccaccatggcacgtgtatacctatgtaacaaacctgcacgttctgcacatgtatcccagaacttaaaatataatttaaaaaagaaaaaaaactattttaaaattcatatggaaccaaaaaagagcccaaatagccaaggcaattctaagcaaaaagaacaaacctaatggcatcaagttacctgatttcaaactatactacagagctacagtaaccaaaacagtatggtactggtacaaaaccagacccatagaccaatggaacagaataaaaggcccagaaataaggccacatctacaactatctgatctttgacaaagctgacagaaagcaatggtaaaggactccttattgaataaatgtgctggaattactggctagccatatgcagaagattgaaactagaccccttccttataccatatacaaaaatcaactcaagatggattaaagacttaaatgtaaaacccaaaactataaaaaccctggaagacaacctaggcaataccattctagacatagaaactggcaaagatttcatggcaaagataccaaaagcaatctcaacaaaagcaaaagttgacaatagggatctaactaaagttaagagcttctgcacagcaaaagaatctaccaacagagtaaatggataatatacaaaatagaagaaaatttttacaaactatgcatctgacaaaaaggtctaatatccagcatctataaggaacttaaatttacacggacaaagaaaaaaaaaaaattaaaaagtgggcaaaggacatgaatagacacttttcaaaagaagacatagctgggcgtggtggttcaaacctgtaatcccagcactttgggaggccaagcagggtggagcacttgagcccaggagttcaagaccagcttggccgacatggcaaaatcccatctctactaaaaatgcaaaaagtagcagggtgtggtggcacacatctgtaatcccagctacgcaggaggctgaggcataagaattgcttgaacctgggaggtgaaggttgcggtgagctgagatcgcagcctgggtgacagagtgaactctgtctcgaagaaaaaaaaaagacatacaggcagccaaaaagcatatgaaaaaaactcagtatcactgctcattagagaaatgcaaatcacagtgagataccatctcagaccagtcagaatggctattactaaagtcaaaaatgctggcaaggttgcagggaaaagggaatgcttatacactgttggtggcagtgtaaattagttaaaccattgtggaagacagtgtggtgattccttaaaaagctaaaaacagaactaccatctgatctagcaatccaattactgagtatatacccatggaatataaatctttctaccataaagacacatgtacccatatgttcattgcagcgctattcacaataataaagacatggaatcaacctaaatgcccatcagcggtagactagatgaagaaaacgtggtacacatacaccatggaatactatgcagccacaaaaaacaacaagatcatgtcctttgcaggaacatggatggagctggaggccattatccttagcaaactaacacacgaacagaaaaccaaatgctgcatgttctcacttataagtgggagctaaatgatgggaacacatagacacatagaggggaacaacgcacaccggggtctactggagggtggagggtgggagaatgtagagaagcaaaaaaaataacccttgggtactaggcttagcacctgagtgacaaaatcatctgtgcaccaaaccccgtaacacaagtttacctatgtaacagacctacacatatacctctgaacctaaaatagaagttaaacataaaagaacaccaactctggaggcagactagttttcaatcccagctccaaaattgactgtctctgtaaccttgggcaacttacttctctgtgcctcagttttctcagctggaatatggggataataatacagttgatgtgagaattaaaccagcatctggcagtatataagtgttacttattatttcaccatcactgcttttcttttaaaagtaaataaaaacaggaacttacaatttagttgggggtggtgggcaggataatatggacaactcatactaatgtctcttctataaatctgattatttttgcttttgttttttaagcaagacatagcttacacagaacatataaaagaagaaatatttattgaagcactctgccaagtgctttacttaattatattaattaatcctccaaaaactcaatgagatagatatcattatccctaatttgcagatgaggaaactaaggctgggaggccttaattaacttgcccacagttccacagctagtaagttgcagggcaatgatttgagctcgagtctcattctaattcttaagtccttttgccacaccatcaagcacccaaagagtttcaaaagcagttactcactgtttttaacccacaattaaaactgttgatgtgcagagtaaaccattcctctgccaggcgtcctcaaaaccccatccagctgacttactaagaaactgaaaggtagtgtcattagagaaggtcacagaggctgggcatagtggctcacacctataatcccagcactttgggagaccaaagtgcgtggatcacctgaggtcaggagtttgagaccagcctggccaacatggtgaaaccccatctctactaaaaatacaaaagttagcatggtggcgggtgcctgtaatcccagctactcaggaggctgaggcagaagaatcactagaacccacgaggcggaggttgcagtgagctgagatcgcaccactgcactccagcctggtgacagagctgcactccagcctggtgacagagtgagactccatctcaaaaaaaagaaagaaagaaaaaagagaagattacagaaacactaggaaaatcttggttgacagcaactatctttttaaatctcccaggctgtgcccaagctctgggggatttcataaatccttagctaacttgggacacctggctacagggattcacaggaatatgtcagattccgatgtgtttattatacacttactgggctcccaaagacactctcctggagctcctattcactaaccagacaagtatgagtttgggactaatccatttatcaaatagaatagcctaaatttgtaccaggcagatgctgtgtagatttctttcttttcattgggtattcagcaatgggcaagaattttgaggtcttggtccacagttgctcagaagttcccattccccagaagcatgacagagtcttggggaagagtgactgctctgtgacttaaagaaagttgtagccagatttggataatgtccaagtctttacaactaatctcctcctcttctcttctagatgccatcaaccaaagggtgtttagaaatgtgttaataattcccaggagaaattggccaggattacctagtcatgactaatgaagctgtcatctgcctttccttcctgctgtttaataatgccttctaaagagtgctttatgaagatggatagtattataatgctgcactcaagaaactggcacaatgtcaatgaaaacagaggccagcttattttgcatgccactctatttttcattacgctccacaataacttgttattaaatgaaaatgaatttgccattagggactaggtactatttaataactgttcagcaatgtttcatgatttaatttttttttttgtaactagtgcagcagccatgtaagtaaatgtcattcgggattaaatgaggttgaattttctagaacaatcttaaaggtttcatggaacttagtcattaaaactggatgtggtttgaagcttggtttactaaatcctaactttgaattgaccatcttcaaaacaggaagagtgaggaagactctctccatgagtactctcagaaaatgacatagaaagtaagcatcgtgccttatagagaattcctagaaggggtaggggacttaccggacagcagtctcctcagtagcctccccaaagagtatgtctcaatcaagatagtcaatgctattttggaataacaaataaaccccaaattttagtggcttcaaatgataaaggtttgtttcttgcttgtgccacacatccactgcagggctgtatgtctgtcatgggttatcttgaaagccaggatgatcaagcacccactatctggaatgatgacagagggcaaaaagagctctggagggtctcaaatcagccattaaaagcttgatcttgaactggtcccatgaccccaacccaagaagtgggagagggccaagaattataattttactgtgtactcaaaaggcagaaatagcatatctagtgatcagtcctagtgggtactaatgtgagatcaaaatgaggatttcattacaagtctaaagattcaaaagtgcctcttgcattctgagagaaacctctactttcccagactcaccttttcgctgtggtcacagacatccaggcagcctcgcttctttcctgaaagtcggacgttcccatggtccctcctcttcaaggaatcagccatcccaggactcgttaacaccaagtgatctgtaactttaattcatgtcaatctggttatgtacttgaaaattgccaggatatttttgaattatcagtatcattaaagctcagacacatgtggataatgaacaatccttccccttcacctataaaaatccaaagctgacattgaatttatgctatttaacataaaatttcttggcattttttaaacaaactgtataaggactgaattactgcacaaagtattgcctgcttttcgaagactgagaccacatgatttaaatgtaacaatttttttttttttgagatggagtcttactctgtcgcccatgctggagtgcagtggtgtgatctcagctcactgcaaccttggcctccagggttcaagcaattcttctgcctcagactcctgagtagctgggattacaggtgcacaccactatacccagctaatttttgtatttttagtagagactaggtttcaccaagttggccacactggtctcgaactcccaacttcaagtgatccacctgcctcagcctcccaaaatgctgggaatacaggcgtgagacaccatgcccgcctataacaattttctacacagccatggtgtgtgtgtgtgtgtgtgtgtgtgtgtgtgtgtgtataggttttcatccatggtttctggatcataacccccatagtcttttgttataatgttggggtgctgtaggcctcagcagcaggtctcaggaaacagaatctctctctctgaccttcccctgtcctcctttcatctgcctaaggcaggactcgaaactgattgtaggtcagaagcccctcattccagaggggtccagccccataccctagaggaaggaaggctgcacagagaggccaagaaaagcctaaacacacaggccttgctgggtttagattatgtgctttttgtccaatcacatttctacatggttgtctatcatgcctatgtaatgcagtctccataaagacccaggaggacagggtttggaaagcttcaggatagtggaactcaggaggttcctggagggtgggggcctctggtggggggtgaaagctctgtggccctttccccataccttaccctatgcatctcttcatctgtatcctttgtaatattcattataataaaccagtaaacatgtttccctgggttctgtgagccactccagcaaattaatcaaacccaaagagggaatcgtgagaacctcaacttgaagccagtcagtcagaagttctggaggcctggacttgtgactggggtctggaggtggcagagtgggggcagttttggggactgagctctcactctgtgggatctgatgctacttccagcatcaatgtctgctgcttggtgtgtggggaaaaccccccatgcctttggtcacagctttcttctgtgttgatggttgtggtggtggtgtgagagcagaggagaaacagtttgaagagttttccccaaataactgaggatggtgaatacaaaagaacttgtataatttaaggagcctctcaaatggcctattaagtattctgtgtgatactttgtattaagagcgatcctcactgaatcgtgaaattaaagcctaagtgtatccttagagaagaacaactatttccgaaccatattattaacggtttccttattatattagtctgggttcccctagaagcacatcccaagacagaatgagtacaagtgattgattcaggaagtgatcccaggaagtcagggaggggaatgggacagtgagccaggaaagagcataagcccaatatggtgcacattcatgagaaggagaccactgtgggcagctggagtgcaggctaattggcaactgataactgctgggtgggtggaggtatcctaccagaggggtgaggcagccagttgtatgtactgcaatcctcatttgtcattggtgaggactgtcccctcagtcaaaggggatcatgggaatcatggaagagttgctcccaaaatctacatggagaagtacgtctgtgtagcaaaggagtggaccgtggtggccatgagaaagctcctcacaaacctccaacctcagagaatatcattgattaagggccccagcagctgctccctgaaattgatgtgctaaggcagaccctttcctggaaaatgcagggctcctcttacagcaaattgtgctcaaagcctctccaggtacctttaccaaactgcccttagactggacaggggtctagaatgcttctgcccaccctctctccttcactggaagattagatttgcattgcagtcaatggctctctctgccttttccagatccctcctcactttctcttacatgagcattttccctaataaaatattgcatatttaattccatcttggtgtctgcctgtagaggactcagattaacaaagacagtaagtgtagtgacacagcagcactttgtacatagtattgaatacaaatacattagatggatggatggtgtgatggttaattttatgtgtcaatttgactgggccatggggtgcccacatacttggtcaaatattgccctgggtgtgtctgcgagggtgttttgggtgagattaacatttaaatcggtagactgtgtagattacgctctctaatgtgggtgggcctcatccattcagttgaaggcctgaatagaacagaaaggctaagagcgaattcttcagcctgactgccttcaaactgggacatcaccatttttactgtcctcagactcaaactgagctatttgctcctccttgttctcaaggctgtcaactcaccctgcaggtcttgggacttggctgcctccataaccacctgagccaattccttataatctccctctctctctctctctcatatataatatatattatattatatactaaattatataatgtaatataaagagatttatgaggatgtttattataatttatacacgtaggtgtgtgtgtatatatatatgtaagggctcaataggctcagaaatctcacttcttatattctacaaaaaaagggtttggaatctgttgaatcaaaactcaggtcccattttgtgatatgaaacagctcatcacaaaacattttcacagcttgtttctagattttggggcttgatattcatatgtttgtgtaagggctcaatacttttatataggcttagaacataaaatatatgttctgtttctttggagaacactgactaacatagatgggtagatggatggatggaaagttggatggatggatgcatgggttgatggttgggtgggttggtgtgtggatggataaatatgaggtcatgaaggaggatatctctgtggttcagggtcatcagggaaagcttccctgtggaggaaggacttgaacttgaagaaggacaggagagaaggaggagaacactggggagtgggaggtagaggaaagaaatcatggccagcaaacgctaagaggaggcagactcagagcatttgggggtcagtgaacaaaccagtatggttggatccaagagtctgtaaataggaagagtgtgagttatatttaatgagataatgaggctgagattcgaaaccagtttgcttccccatagagtatgctttcacaccattcccttaacttccaggtgaatacctttggtcaaagaaaaagatgtgatatgtttactcttttccaaaaatattttaaagtgcagttccttcaagaggcatggaggtcacctcctcaggaaagaattccctgtgtaaccctgtgtaacataggaactctcatcatgttctatcttagcacccaacttccttctttcccaacgttgatcataatttgcacatatttatttgcatgctcattaactgactgtttttcccactcatctgtcagttccatcaagatagagacctgcactattcaccccagcacagtgccaggttgactggataaaacatggcagttagaaatgtgagatttaggactgggcacgatagctcacacctgtaattccagcacttttggaggccgagatgagtggatcacttgaggtcaggagttgaagaccagcctggccaacatggtgaaaccccatctctactaaaaatacaaaaatcaggcgggtgtggtggtgggcatctgtattcacagctgcttgcggggctgaggcaggagaatcacttgatcctgggaggtggaggttgcagtgagccaagattgtgccactgcactccagcctgggcaacagagtgagatttcatctcaaagaaaaaaaaaaaaggaaaaagatatgtgagatttaggcttattatatcctagctccattaatgactctaacagcttgaccttgggcaagtaacttcggcttcagtgtcttcatctacaaaatgaatgataatacctcacagcactatcatgaagattaaataggatagtttatataaagcacagtgccccgtacatggtaagcattcaataaaaggttgctattgtttgttattacacctcaagacttcttggtgtcatttttctgctgggtgaaattgcctctgatcaattaattatgacagacattgagaaagaagctttaatcatttgaatcatgacatctagatcaatgactccttgaactttttcgtgacagtaaatagcccttaattacttcaaaaaattgttagatccctccaacatgataataattgtgtatttttaaaactttgattgaaatacatataagaccaaaaaactctctaaattcaataatgctttaaatgtattttattggccttaacagcattgatacgtgtcttaaaaatagctggaagggatgggcacagtggctcaacgtttataatctcagtgttttgggaggtcagggcagaaggattgtttgaggctaggagttctcgaccagcctgggcaaaataggaagaccctatctctctaaaaagtttttttttaaaaaaatagccaggtatgttagaatgtgcctgtagtcctagcttctccagaggctgaggtgggaggatcactcgagccctggagtttaagttagtccgctttcacactgctgataaagacatacctgagactgggcaatttacaaaagaaagaggtttattggacttatacagttccacatggctggggatgcctcacaatcgtggaggaaagcaaagagaagcaagtcacatcttacgtggattgctgcaggcaaagagagagcttgtgcagagaagctcccatttttaaagccatcagatcttgtgaaacttattcactatcatgagaacagcacaggaaaggcctgcccccatgattcaattatctcccactgggttcctcccatgatacatgggaattgcgggagttacaattcagatgagatttgggtggggacacagccagatgtgtgtgtgtgtgagacagagcatttattcaaccagagacaatgtttggtgggcatctgggtttaagaccccataggcttacctccagggccatcccgggatctgagacccagtggggtggaaacactgattttgttgggtaactgtgcaagtcggaaaaaaacctcaccttttcctccttgtgggcttgaagtaagtgttcttccctctcatccttccaacaaggcagccctgctcagacaggtgtgtgcccatctcagacttccctcagccatctcctttagaggggctgcctgttcacgcacatcagtcatttgctcttttatataccccatcatgaatatgtgactatgactatgacttcacatcacttcattctcagaaccgtatttctgagtgcattggccagaaagatgaaaaccctgaggtgaccacacatgagcataatgtccagctaatttttgtatttttaataaagacggggtttcaccatgtgggccaggctgttctcgagctcctgacctcaagtgatccacccgtctcagcctcccaaagtgctgggattacaggtgtgagccaccacgcccagctgagatgatggcaatttgaacttctatggtgatgtggatgatgtgagagatatctggcaggtaaaattagtgggtgatagaatggacgtgcaggctggggacgggaggtaatgagattgtctcctagatccctggcttgcacagctgaatgcatggtagggcgatgcactaacataggaagcacatggacaacaacatcaaaagggaaaacctttgtcatccagtcacatgctttgtctacatgccactcattttgtcagtttattggactaattccccagcccattcactaaattgatagatgctggagcaacaatcatttgaccagctgccatggtaccacagaaagggtcccctggatgccatgtgatgaaaagtaaggaacacagatggtgaagtcagagagttatggttgcaaagctcagcatcctggttactaggagattacagttcgtgctttgctaaatctcaggttcctcatctgtaaagtaaacttaccttgcatgagtacttttaggattataggagttactgcacataaactgctaagtgcaggtgctgttcgggcactgctgaaaaatccaagagaaattgctctgctcgctgtgtgagtgcaataattctccatgaaggcagtgaatcatcgatgtgttggatggcaaggagacacactttggtgaagaatgccttttgcagagtgctgtaggtctgaaaatcaggaatgaagggtgggaggcaggaggctacaggtatctgagaggagtctgaatatattaaagaatcccaaaggagttttctcaaccatggccataaccccaaagaggtgaacttagtttattaattagcatttgcaattgtagcctaaagtctaagaaattttttagttaattaacacttgtatgagattggatatgatctacttaagaaaaaacacacacatatttttatgacagaaaatgtaaaaaattcataaaatcatatagaagaacatttaaaaataatccataatcccaccaactagaaataattactattaatattatgtcatgtagcttttcagactaaaaatactataaacactttaaaaacaaaattgtgatcacacagaaaaacaaatttgtaatctatattttaattatatcaatgtcatgaacatttttgcatactatttttgcaaattgttctacaacatgacttttaattaattaatgttttttctgagatagaatcccctatgcccaggctggagtgctgtggcaaaatcacctctcactgcagcctcaacctcccaggctcgagtgatcctcccacctcagcctcctgagtatctgggactacaggtgtgtgccaccacccccagctaattttttgtaatcttgtagagacagggtttcaccatgtttcccagaccggtctcaaacttctgggctcaagtgatctgcccgccttggcttcccaaatactgggattataggtgtgagccaccacgtacggccttacaacatgactttttaaggcacaaagtagtataacctaagtgccataatttgtttagccagtttcttagtgttggtcagttagcttgttttttcagtatctgttattgtatataactctgtattttaagttatatacaggcaaagatcttacacataacattttgtgtacatctcggattactactttaagaaaaattactaatggaattattaggccaaggcatattaacattaaagatattaaaatattaatccccccaaaagattatacaaaattcactcttgctcacaaagttcaaatgtacctgtttctggtcctacttcaaggatgtgatagcctgtttgttaaagagtatatttgggttcagagattttgaccttctctacctgaaatccgataaatatatagtgatattttcttcttgctcaattttattttctgttttttaaactctctggaaaaaaaattgatgtatgatgatgtgaacatcatttgttcattccctcactgatttagaataactcctccccctcgatctgtttctagtttgttttgtttgtttgttttttagtgtcattgacttatttgtgtgcaaaaactactatattcatcatggagaagtcaaaatatctggcagtgtagctgcctcatccccctcagtcttctttttggaaagaataaaataaaaacagaaaattacagcaaatactttgataccacctaccgcatattattaaatgttagtattttaacatagttgcttcaaacatgtttcttagaaaagaaataaaatatgacagattgattcaaagtcccttaggcttggttttcccactcactccccttcctcccaccctagaagtaaccaccaacatgaacttggcatggaaacttccaggccatgtgttaaaactttaacttcatatatatctgcccataaataaaatattgtattgttttgtgagttttcagttacataaacaatcttctagatgaattttagaatcatgccgaaatccctgtagactcttcttttggatttttattggagaggcattaaaggaatatattactttggggagaattgacatctttacattattagttttttcctctaaggactaaagtatgtttttcatttattcaagtctctactctgtcccttagcaaaacactgttattttcttcttgtatgtccagcacatttcttgctaagcgatatctttttttgtttgtttgtttccagggcccagtgtttattgctaacttacttctaggtattttatgatttgtgttgatactgagaataggattttatttttgtattataatttctaactcattattactgagatgaaagaaagcagttaactttaaatgtttattttgtaactggccatataactggattcttactatgtgtatctaatactataatttttcaattgattcttttgggttttcctggtagaaaattatacattatgtataacactaaagatttgcaaataatgataatttggtctgcttcttactgacagttacacttaatttctttttcttatctctatgaattagcttggacttctataacaacaaattacaatgatgatagaaggtgtcctcatctaattttttatgttaaaaggagttcctctaacatttaatacttacatagaatgttgactgttgcttaagacagcctttattatgttttttcttttagtataatgaacatttttcccaatctgtatataattgcaaaaacagattgatttttgaaaattggaactcaactacaatttttggtagtatttgtaaaattgaagattcaaccctcaacattagtatttttggttaatcatatgagaaggggtgttagactattcctaatcctggctttaaaatgagttaatgattttattttgatcaagtcctctcacctctctgggcctcagttttctccttgtaaaatgaagagttaagataattgctgaaagtttatttcaattgggtaagaatccaagccctattttaacaaaaacttatttttttttagtcaaacaattttacaaagtcagccacacctaataaattcacaaggctgaagaagattgaaagtggccaggtgctgtggctcacgtctgtgatcccagaattctgggaggcagaggcaggtggatcacttgagttcaggagttcaagaccagcctgagcaacatgatgaaaccccatctctaccaaaaatacaaaaattagctatggtggcatgcacctgtagtcccagctactcaggaagatgaggcgggaagatctcttgagcctgagaggtggaggttgcagcgagctgaggttgcagcgagctgaggttgcagcgagctgaggttgcaccactgcacactgtgggtgacagtgaaattctgtctaaaaaaaaaaaaaaagattgaaagcttaggtttagtacacagaaaaatgaactcaaaacaagttcaatataagtggactgtgaaacctgcataaagttcatagctgaagttctaaaaataataactactacctattgagtattcatgatgtcccaggaatagtgttttacttacaatataaactactaactgtttataacaatgaagtaggcaaaatcagttttcctattagagacaaggaaactgaggtattgtggggtaagaacgctgtagagtcactcactcaaagtccattccagcctccttctggtgtgtttccttcctatgttggattacccaaaaagctcaagtccagatatcccagactttcatgtagatagcattcctgatatgatttaggttgcatcaataagcttcattggccagagacttgattttgagacagatctaggcagagagaagtggcatgcaagactctgctttgcagattgttgtagtgcagtctggggcctacagttctgggagtggctttctaatctccagatcacagtcaaggcagggtacctggacccagtggctggaatagcagctctctgagtcctcagaatgagatggagaaggcagtcccctacacaggccaattctaatgtgtctttctggaagccattcacagatggcctgtttttccagcccttccagcaatgttgtaagcacctagagtccttctgaaatccctttctccttgaagtatctaaagtggtttctattatctgcacttgaactcagataattataagaggtgcaatcttgcttttcttatgtgccccattcagctaaaatgacccaccacacagtataatggacccgggattagatttggatcaggtaccctggcttcttagtcccagttgttatttaatagctgcctgactttgggcaaatttcttcaactcttccgggactcagttttctatctttgacatgaagaaattgtcttttctggtgttaacaatgtatgattatcattgacacagaagaaaatgtgacaccctcgatgcagatttcctgctcagcagttcctagtaagccaatgacagacctgaaaatagcaagcatggctatttcccaagtcttggctcttccttgatttaacgcatctggcagaatgccctgtggtgggcgcagaatccagaccccttcccaggtagggacttgaaccactgcagcatcaccctggggggcagggtatgacaccagcaggacttagcatcattaggaagtcactgagcaggcaagctgagagttacaaagcctgtggccgctacagatcaacccaagcaagaggtcaggaaactggaaaatgaagacaggaccacggagaattctgggggcagaggtcagtcacaagtcagcgatagaagtcaggaagtctagcctgaggccaaggaatctacagttcataaaattctggtcaaacaagcagacagggatgtggacaggcactcaggcctcattagtgaggacacagaattcacagtgcagtttaccaggtaagatgaggtccctcatccactctctccctgtccactcagattcagctaactcagcactggggccataggtttttgcctggtgtgaaaggaaactcagaaatgattattgcatcaaattgacttgaatgagttaagatctcagggatcattacacagagtaaacctggtcccagaacagatgtttccagcccccatgataagcaggaagtgttttcagaagtgagcaaatcagtggcatttggttagaatgtctggctgactgaggacaagataatgaagtgcaattgaattctggcaattgtctgggggtggggaaggggaggaagggaactggatggggtggtgggtgctctggccataggaaggtggtcttctagtgtcccaccatctttcaggaggaatgaagatacattctaacattaataatgccttcttagtttcctatcttcatgtgtacagttctctatcaactctagcccacaactccaaacactacccttttctatacctgccttcagatacagagagggtatatctttctatataccctttagaaagatttagatttagaaagacttagatttagaaagggtatatatcagcctctttccttctcagcaaagaggctgataaataaatccataataagataccaatgattaaaataacataatttgtttcccttcctagaggttgttgcctttctataggcaaggtaacaatgatgaatttagaactgtcagggaaatattacggaacaagaacagggctgatagactcttaccctgtcaatcttcattattcacagatttcatatttatgaatttgcctccttgctcaaatgtattggtaactgcaaaaccaatatttggcagggattttttcatcattcatggacatgcattgtggcaaaaaaagtgagttgcccaatgggaatgttcccagatgaggttgaacaaggcaacactttgccttcttgtttcagctcctattctaacaagtgtccttttctaggtctacatagtgtcacatttttcccatatttgtgcttcttgttagtttcactgtataaaatggcccacactacagtgtatggctgcaacgctgtctggccttttagaggacatacaaagtatgtgtgttagagaagcttaggtcaagcatgagttatagtgctactggccatgagttcaacattaatgaatcaacaatatatattaaataaggtgggccgggcgcagtagctcactcctgtaatcccagcactttggaaggccgaggggggcagatcacctgaagtcaggagttcatgaccagcctggccaaaatgtatttttagtctctactaaaaataaaaaaattagacgggcgtggtggcgggcgcctataatcccagctactcaggaggctgatgcaggagaatctcttgaacccaggaggtggaggttgccattgattgtgccattgcactccagcatggggtgcaagagcgaaactctgtttcaaaaaaaaaataaataatgtgtctgtaaacagaaacacacacaaaacaaggttacgtattgatccattgatgaaaatgttgtgaccagaggcttgaagaacctaaccctgtatttccccagaagtaatagttccctactttctaattcagcattcgcagagactctacagaacctaactacctgaataacaagaacagactgtgctcggtctccacagagcgacttgctcagcctaacgccattcctaagaaatgctcacaggggccccttgcatgactgctgcaaagaattacgatgaaaatacttggaaacatttttcaaaatctttacttcttaacctttttacaggcatggtccaaaatcgtcactgacaagccatgaatgggatggcccgtttaggattggatgtgctgttccggaaactgagataaaagcagctctgtagtaattctgtctgaactgctttttctgtccgaaatgatttttatgtcctcttcaacagattccggatgtgaatgcaacactcttaaaagaggcacctaagtaaggaataatttcactaaaacgtttccacatagacctcccaggtggaatcctcagcaggaggtttggctcagggcagaaatgcgttgatggaggtttccagagggcgctgttcatcctactctggcaaattggagggggtttattgatttatttatttattttgagatagagtctcgctctgtcgcccaggctggagtgcattggcgcgatctgggctcactgcaacctccgcctcccaggttcaagcgattctcctgcctcagcctcccgagttgctgggattacgggcactccccaccatgcctggctaatttttgtatttttagtagagacggggtttcgccatgttgctcaggctggtcttgaactcctgacctcaagtgatccaccagcctcggcctcccaaagtgctgggattataggtgtgagccaccatgcctggccaagagagtttaatttggtcaccaacagagggaaatctttctttggcatttagtacgaactgtttctgtcccttgaaaaactattctgactggaattgcaacctgacaatggcctggcaagaatcaatccaatgacaccaggacacaactgcccctatagaagcctggtaaagcttcattatccttagaagacacagcctacaacaggaatcctgtgtttatttttaagcagtagtaccagataggtcacttctcaaaattgttagtgcaaatgtcagctaaaagttttgtttttctggaaggaaagcatttcaaggtgacacagagtccctttctcctgtatttttcttttcagctaagtgttgcgaatttcttttctttgcatttaaattcatgagataaaaagaaggctccctccccatcattcactgctccctagactcgtaaatgccacatattctgaacaccacatctcggacacaaatttctcacagaaaagagctgaaaggcctctcagtgaggcctccgccagctgaggggccctctcagcccggcctccctcagggccttcccagcgcctctgcagctccaagcacagcggtttgtgtggctgagcctagggaggaatttgtagctggggactggggtcacgggccttccggttttctacttagtgacacgctttctcacacaggggtcaagagttagggcctcaccagtgcatccttcaagatgagctgctagaaatgttttcttaataagagtccttttctttcccttgagacaggagggtttgaaccctaggcctttcaatccctcgacagaagctataaaccacaaatgtgcttcatgttgaaaggacatgcaagtgaccagcactctcttctgctttctgcccctacaccccccgcctgtcatatgtgccgacaacactctcttctcttcctcagccgactgctcgggcagtctgcccattctggtggggaaagaagagggggaaagcttcctctgcccccagggggccatcaggaccacatcagctctggcgggtggtctctagcaggccttttctcagcccctgcccctggcaccagacatgtgcaccattctccgcttgcttgtggatgacctgcctgtttaacacatcttctaagagttctgtctgagaagtcacatttgccccgttgctgtgaggcagaaaaacccagccgctgctctacggggagaacaggagaaccagcccagctctggagggacggctgaaccggagcacacccacacttgtgcttgcccctaaagccagccgatggagatgaatttggaatgttggaacatatcacagtgcagattttcttcttcttctttttaaaaaatttttttgcaaatatttttagcaagtgttaaaatgtgtgtgtgtgtgtgtgtgtgtgtgtgtgtgtattgggattttctttttttttttaattaatttatttttttgagacagagtctcactctgtctcccaggctggagtccagtggcacagtggtgtgatcttagctcactgcaacttctacctcttgggttcaagcaattctcctgccttagcctccagagtagctgggattacaggcacatgtcaccacactcggctaatttttatctttttagtagagacagggtttcaccatgttggccaggccagtctcgaactcctggcctcaagtgatccgcctgcctcagcctcccaaagtgctgggattacaggcatgagccactgcacctagctgggatattctttatttaaaaaaaaaaaaaaaaaagcctgaagaaaatgcaggagggtagagacaagaagaggccaggtactcagctaagcaagtgagggcaattcttgacctccaatgctcagtccccctgctgtcttgattggcacaggatgtgaagggatgatgagaggatggctaagagcagtgagggcctgagcaggagccacgagctctgtgttgctggatctgaagtcccgagcctgggccttcaccccataccccgcccctgcactgactctaccccaatctgcctctcactctcccagctctttgcaccttgtacttcccagtacaagctgaaagagcctctgatggctgtcccggatgtcacagggacacacaggtgtggctggatcagggaggacagagcggcagtctctgtggtagcatctcaggcatgaggaaggttcccagttctctcctgggtcctgctcaggttcctgccacctgaaattctctcctcacaacttctgtcttgtgacttaagcttataagaatttgtcttctcgaaaaatgcaaatgttctcaggatgggatagcactttaaaaattatgactacggagatcttatcatccaaacaccaaatcagaatattttacaaagcacatttcttatcttttttcactggatgaattttattttctagattttttcctatatcaaagcaagtcataaatgttatttaaaaatttaaacaaacataaaaggaaatctactcctagctacacatcatttccctggcatctacttcacgagaagtataaccatggttaacaatgtgtggttgtccttctagatgtttctctgtgtgtgcatgtgtgtgagtgtgtgtgttgttgttgtttttaacaaaaatgttattccacattacatactgctgtggtatttgggttttttttcccccattggatacactagaaacatctttccaggaagaactttttttcagtctataaatattgcttgaaaaatcttcaaaagttacatttcattactatacttttagaagatcacaggtttttattgtttgtttttgttatcattcttggcctttattaaacagagtaaaattataagaagtcagggattgtctagggcagtgttgcccattcaggctttgtgtgatgctggagatgttctttacctgtgctgtccaatacagtagctggcagccacttgtggttgctggatacttgaaatgtgatcagtgtgactgagcaactgactgtacaatttgcttaattttaattaatttagatgtgactttcaatagctgcatgtgactcgtgactactgtattggatagcatttttttttggacaaatcgatcatccactcccaaaggacttatagaaagaaactttgaatccaaatgtcctggatttgaaccctaattccttctacttgccagctgtgtgactttggataacaatagaaacactttattgggttgttataaggattcaatgagttaatacttgcaaagcaattgaaccagtgcttgaacatgccattagagctcaacaaatattaggtatagaattctttcctgagaacaggaacagagaggaaagaaaactttgggtggggaaggggagaaggatggagaaaggaagtagtgagtgaataaaagggtgctttattcccacagtaagggtagggcagagtgctaccaaaccacaatagcctctcaatattgcatagagcttaccttgactgcagtcttaaaaagatgagggaggcaaaagtattgcctggaaagtcgattttttcaaccctttataaaattcctcttttctcttcagctctttattaaattatgatagggttgtgagcagctctgcagggcacctcccctgcagacctgcctgaaccctgcccagggccaggccagacaaagctctgctcaggacagccactgattcactctctaagcccaggtggctgcacaggcctcccagagcctgtggcaaacagcaggcacagtgtctccagcccccagggcagtccttgtcctgcatctgtttttaaggctaatcccagcaaagggtgagaaagaagaatctaactttgtcacagaagcaggatcctccttcccaaggaaaagtggagtctgtatagttagactaagttgatgaagtgaagcaagtatttttctcgtgggctgtttaagaggagtttactgattcagactgcaggcccctcctgctacacacacacaccacccccgtgtctaggctgtctggaatgtgtttctctggttatcaccacctcctgagacactactctgagcagcaaaatcaattgacttatttgtctctctaacccctgcccactgagtgattcatgaatgatttttgaatgagtccttaaaaatccatttctatcacgtatgttctctgaacactaagcatctttaacattaggaacaggatttaaagcagggggtatctattgtgttatcagtcttgagttagcacagattgtaaaatgcacccctttcttagggaaaggcatcaacactaaaccggtcattgggatgcctgggttcaagccaagattgccctccggcatgaatctcaacttcctttttttggtaaaatgtggcagagacacaggtgaccttcaagatccctcaaacttacacacattgtacactgccccaagctctcagggttgagaagatcctccccacctggcgccattttcccagccaggcagccctttttcaagacttgccggatattgttgctcttactgcagcttctgaaaaaagggccagttattccagtggcacaacagaaaggtccacaacggttgtcttctatgggagccaaacccatccctccaggccctagctacagttccgatcacctcagttgcttttgaggggggattttcatttacaaaccctattcagaggctttttggatgccttctgtcctggtgcaatgaagcaggctgcctttttttccaccaaatgtcccaaagggaaatgacattcaccaagaatttggacaaactttttgagaagaagaaacagtgtgaaaattgcacagatccttgttacttaaagcatttgagaagaaaactgcaggaagtagtagattcgggacataaaggacatcatttgcctgccttattatctcatttttcagtgaagctgacaggacagctgcctgttattacagggcacaccaggaaatgtttagctgccaaacagaaaagaacgagtgagggattaacagccctgttcatgccacacaaatagaattcttgcacctggtagtcacgcagttagatttattatttcatagggtatgttacttaaatcccatttacaaagaaacaaaaacaacccaaaaaggcaccttaatgatactgtaattatgagaagtattagtaaccattttgcagtttttagtctagattaaattaattggtggtggttttcatttaatcacactaatcttttatttggtttctataatgtcgcaaacttactattctatgttgcaaatctaaagcgttcttaaaaatgaaagatcgataacagtttaatcctccacaaggctgctctcattaatgatgttgtgtaacaatagagagctctttgcaaggtggcagatcacctacagaagtgagatttcaaaaaaggaaataatttccatctcagcttcatttctaatattaggaggtagaggggacagttgggggcagccaactccttgagctgctatcagagatcagagaggctgcaggggggatggcagggctcctaaatggcttttttgttcccacccagagtgaattcacttccctcgtgccaaactccagtaaggaacctgacgagagaaaaagtttaagatcctgtgaaaaccaccctttactatcactgatcatgtactttatcagatgattctttgaattaattaaaaacaaaactcctcttggagccttgctgcttaaatccttaaagcattagggtagaagcttgagactgttaactcttcattttcctgtagcatctgttatggactgattgtgtgtatccataagattcataggttgaaatcttaactcccaatgctatggtattaggaggtggggactttggaggtgattaggttagagccctcttgaataggattagtgctcttaaaagaagagacacacgagggttctctctctctcttttcctttctctctcattctctcctctccactatgtgaggatacaaagagaaatagccatctgcaaaccatgaaggaggccctcaccagaccccggatcagtctgtcccttgatcttggacctcttgaggctgggaaggatccagattcagatccttccaagcatccaaaactgtagagtgagaaacaagtgtttgctgtttcagccagccagtctgtggtaatttgtcatagcagctcaaactaagacaacatctactaaggcctctctgtaccaaccctagatattaaaaaatgagtccaagtctgaccctgtaggggctcctcacagtcggagatcaccaactcttcttggagatgtcaggaatgtcttagttttcaagggcagtattagtttttcaggtgggcaggagtcaaggacatcccagccagaaagaaccacaaaaagggcacgcaaaaggcttgagaggggaactgttaagtagtcgggtgtgactagaacttgggtggctatgggtgaatgaagggaggggaggctgagccagcacccagggccttaaatgtccttttaaggggtgtggtctttgcccccaatgtgatggagcatcataagcagcagagtaatatagcttcgtgatgactgggaaatttactcctacggcacaggggaagatgaatttgaaggaaaagatgcagacgatgggaagatataggagactcaggatagtccaagtaggagatgctcaggtgggttagcagtaagagtggagaagaaagaacagttcccagagagctttgagacatagctttaacaagacgccaaagggatatagagaagaggttctagatttttctccttggacatatgggtgaagaatggcaccactaatatagatgaggaactcagtagaaatttagattaaggaatgagggaagagtggatctgctccatttgagcatgataagtttgaggaactgtggcctgtgtaggtggagatgtctggtccggtagctcagaaaacagtatgagcattcaggcaccagagacctggtgcataaagggagttcaggaagcacagatttgggagtccttgttagagctctcttgtacttatctgaacagagatagtggttgagtccaccagattcagtaaattcactcgaggactgagtgtgcactgagactaaacacaggctgaataccaaggttagagacaccactctaaacttgtacatagaaagagccagcgaaggacagcaagctggaggccagaagctgaggagaatcaggttttcatgaaaaagaatgtgagcagccacgtcacctgccagccaggccgtgtccgtgaccatgggagttggcaatgaggaggtcatcgatcatcctggcaagcggttctctctcttgaggtgcacgaggtgggaggtggggtgcccggtagggtacagtaagggcactgagtaaaagagctgaatttcattgggatgaggagagaatagaggataagagcatggagaccacaaacagagacttgcttttgaagactgtgatagaaaaaaacaaatatccacaaggagatacaaaattatggaaggaattttttttttttagatggagaaaacctgaacatgtgtatgaactactgggagagaaccaggagacagagagagatcagagatggaggaaaagacaaatcagtgtgtaggtgtggcagctggccttatactcctgctgtaaaacctgtctgtggggtcagaagtggcggtgctgggaagagagtggctgaagcgctgggtgactgtgtcaggctggctttgcacatgctgatgctcttctccctgtcacaagggctccccttcatcctctgcccctatcacctccaaaccagattctgcatactccaaggccccttacgtgcccttttctctgaagaccccctcattcctccaactgtaagtgatatttcccttatcagaacctggacacttcatctgttttcttcctcatgggccaacatgctctatcttgtattattattatttgaaatcagggcataaccccattattagatgtttagctctttgcgggaaggaaccttgtcctaaataatttcatgcctcccatatccacccacataacccagaacagtgtgttacacatgctaagtattcaataacattctctaaaaagacaaatgcataacttgaagctaattttaatttcctactggctgcaaccacttctgggccacttcttgccatcatcaatttctattttctaaaaatgtaaatgattttcattttagcttggatgaaatttattggaaagataaatctactgtaatcaaagtcagatatacaaatatttaaattatctctgccacccaaggtaagttatataatatcatggggtatttttttatcagtaaagtagaataataatactatctattgtatgaggttgtttccatcattaaatgaaataatgtatatacagtgcttagcacaagacctgggatatagtaaatgcttaaaaacaatagacattaataataatagttatttgccagttagataatttctaagacctattccaattatgtttgtaattctctctccattagtgcagacaattaagaatagattttaaacataaaatatgcacatatttaataatacaccatagtcatgatggtatggttaatcctacatttaatgtttgtgttttgtttgtttgtttgtttgttttgagatagggttttgctctgtcacccagaggtggagtgcagtggcacaatcacagctccctgcagcctcaaactcccgggctcaagcaattctcccacctcagcctcttgggtagctgggaccacacacacattccaccatacccagctaatttttgcattttttgtagagatgggttttctccatgttgcccaggctggtctctaactcctgggctcaagtaatcctcccaccttggcccccaaagtgttgggatgacaggcaggagccactgcgcctggtccctacatttaaaatttaaagtaggggaaagaaaaaccaactcagaacttgaagcaaactgagaacatagcacttccatgttcttctctgtaaaccttcctgtgtgatcagtggctatgacagctcattcatttgttcattccacaaatatgttttgagtacttatgacatgcaagtttctctggaagaagccacaggggaaaacaaggatgaacacaacccaggctttgctctgaagcattctgaggtgggaggaagataaataagcacacacaaagcccagtattttgcgatatgacaagatactgaagaagacaaactgcaggaaggaaagtcatcagaaagaaggggaggggaccacaacataaccttgcaccaggcacattgatttagaagcaaaagccttaagatcttgcctttcagaagaagcatgctctttgtatgagcctccttctctctttttttaaatttatttattatactttaagttctagggtacatgggcacaacgtgcaggtttgttacgtatatatacatgtgccatatttgtgtgctgcatccattaactcgtcatttacattaggtatatctcctaatgctgtcccaccccactcccccaaccccacaacaggccccggtgtgtgatattccccttcctgtgtccaagtgttctcattgttcaattcctacccatgagtgagaacatgcagtgttcggtttttgtccttgtgatagtttgctgagaataatggtttccagtttcatccatgtccctacaaaagacatgaactcatccttttttatggctgcatagtattccatggtgtatatgtgccacattttcttaatccagtctatcattgatggacatttgggttggttccaaatctttgctattgtgaatagtgctgcaataaacatacgtgtgcatgtgtctttacagcagcattatttataatcctttgggtatacacccagtaatgggatggctgggtcaaatggtatttctagttctagatccctgaggaatcgccacactgtcttccacaatgcttgaactagtttgcagtcccaccaacagtgtagaagtgttcccatttctccacatcctctccagcacctgttgtttcctgactttttaatgatcaccattctaactggtgtgagatggtatctcattgtggttttgatttgcatttctctgatggccagtgatgatgagcattttttcatgtgtctgttggctgcataaatgtcttcttttgagaagtgtctattcatatcctttgcccaatttttgatggggttgtttttttcttgtaaatgtgtttgagttctttgtagattctggaattagccctttgtcagatgagtagattgcaaaaattttctcccattctgtaggttgcctgttcactctgatcatagtttcttttgctgtgcaaaagctctttagtttaattagatcccatttgtcaattttggcttctgttgccattgattttggtgtttcagacatgaagtccttgcccatgcctatgtcctgaatggtattgcctaggttttcttctagggtttttatggttttagctctaacatgtaagtctttaatccatcttgaattaatttttgtataaggtgttaaggaagggatccagtttcagctttgtacatatggctagccagttttcccagcaccatttattaaatagggaatcatttccccatttcttgtttttgtcaggtttgtcaaagatcaggtagttgtagatgtgtggtattatttctgagggctctgttctgttccattggtctatatctctgttttggtaccagtaccatgctgttttggttactgtagccttgtagtatagtatgaagtcaggtagcgtgatgcctccaactttgttcttttggcttaggattgacttggcgatgcgggctcttttttggttccatatgagctttaaagtagttttttccaattctgtgaagaaagtcattggtagcttgatggggatggcattgaatctataaattaccttgggcagtatggccattttcacaatactgattcttgctatccatgagcatggaatgttcttccatttgtttgtgtcctcttttatttcgttgagcagtggtttgtatttccccttaagaggtccttcacatcccttgtaagttgtattcctaggtcttttattctctttgaagcaattgtgaatgggagttcactcatgatttggctctctgtttgtctgttattggtgtataagaatgcttgtgatttttgcaccttgattttgtatcctgagactttgctgaatttgtttatcatcttaaggagattttgggtggagatgatggggttttctagatatacaatcatgtcatctgcaaacagggacaatttggcttcctcttttcccaattgaataccctttatttccttctcctgcctcattgccctggccagaacttccaacactatgttgaacaggagtggtgagagagggcatccctgtcttgtgccagttttcaaagggaatgcttccagtttttgcccattcagtagctggttttttgaaaagatcaacaaaattgatagatcgctagcaggactaataaagaagaaaagagagaagaatcaaatagatgcaataaaaaatgataaaggggggggggagagatagcattgggagatatacctaatgctagatgacgagttagtgggtgcagcacaccagcatggcacatgtatacatatgtaactaacctgcacattgtgcacatgtaccctaaaacttaaagtataataataaaaaaaaatgataaaggggatatcaccaccgatcccacagaaatacaaactaccatcagagaatactataaacacctctatgcaaataaactagaaaatctagaagaaatggataaattcctggacacatacaccctcccaagactaaaccaggaagaagttgaatctctgaatagaccaataacaggctctgaaattgaggcaataattaatagcttaccaaccaaaagagtccaggaccagacggattcacagccgaattctaccagaggtacaaggaggagctgttaccattccttctgaaattattccaatcaatagaaaaacaaggaatcctccctaactcattttatgaggccagcatcatcctgataccaaaggctggcagagatacaacaaaaaaagagaattttagaccaatatccctgatgaacatcaatgcaaaaatcctcagtaaaagactggcaaactgaatccagcagcacatcaaaaagcttatccaccatgatcaagtgggcttcatccctgggatgcaaggctggttcaacatacacaaatcaataaacgtaatccagcatataaacagaaccaaagacaaaaaccacatgattatctcaaagatgcagaaaaggcctttgacaaaattcaacaacccttcatgctaaaaactctcaataaattaggtattgatgggacatatctcaaaataataagagctgtttatgacaaacccacaacctccttctctccttagctcaaattcttcacaaaggtgaggaaagaggccgacttgtcagcattaagtacccagtggggcatcagtagactagttccacagggacttctattattaagccagctggattatcctgctctcaggggcaaagcaatttctataggaagggttggtggtgaatctttttttctccttttaggaccccagaagagctaagagaagcaaaatcctccgtctgaaagagaggtagtttttggcagcctatggaagcctgagtcttccttctattcaggtgtctggctggctccccatcatcaggaaagaagcctcatgcttcaaagaaaataaatcctcagaaaactgagcatctttttaaaaatagaatttccagaccatttgcaatttgtaatatagacttgggctcttttggagaggggaaagtgaacaaattgttgggactctaattgatacatggatcggcagacatcctggaggaacttcagcctgttggtttatcaggtggcttgtcccttctgcctgtgatgggtttctgggaggtaagcaggtggtggtagtgactgcgaggccacttgtggagactgttggccagttatttacagatcatatgcaggagtatttcaggaataacctgaagattatgcctttgaaaatgttagcacaagaggtgtgtcccacacttaaaaaaatgttctttgctttaaaatctctctaaacttgctagatactgataacaatttgaattgtttatgtcaatatcaatttttggtggccttaatggaaacttcagggcataatgaagactatttgcagatacattgggttttttaattaatataaaattaattaaaggaacacattttaattctaaaacctagttttcttaaaccttgaagttcaacatagaaaccttattactccatttataaattgagtagagtttaaccatcagtttcaaggaaattaaagctctgtcaactaaagctgcaggaactaactttcccaaacactttcatttacatattgagttaattaaatcctgttaaaaatttcaaactgcatttacatacttaatatacagaccttttttagcacttcaaatgcttctatcaaacaaaatgttctcaaatatatgactctagcaaaatgtaactatagtaatggtttagagccttagtaaaaaggtttttaaaggcctccttatgcctttcaattaaaaattacaaattagactctttaaattgggataattccctaaaaggtgaaaacctcccttactaatatttgaaataccaaacaaatacatattatcctcaaaatcataaaaatctcttcctgactttacacaaaaatgctaaccctatagatttgatttacttctctaccgctctactttaaaccttaacaaaattaaaagacagattaagaaaatagctacaccaccccaaacaaaaggaagtcactactttagtggaacaagcattcatattggccagaggtttttagctgaggcataagatttgattctctccatggtaatgacctgcaacacagtgaactctttttatagttgccatagcaaaagtgactccaagtccatgccctttagacatcactggttttacctggtttcaagatacaaccttaccagtctatcggcaacccagaccctgcaccagtttgcttaccactttattcgctaggataaagaatatttatgcttgattccatcctgaatgtttttcttattcttgcattctgactcacaaatatctaaatgataccctataaaattctgcatatctctcatcattgctgtaactgatggcctcaaaccaagctggtccccttcacatgacccagccagtctcacaacatgagagacggttgacacatgttctcttccttttcccattaggtccatctcacacgtaagtctctttgattgttcccaaagggattgacccaagttcagacacaatagatcaagtgaggtgtggaaaggggctctcctttaaagactgcctctcaaactgtaatgtacatatgtaccactgagatttcattcaagtgcagaatctgatgcagtaggtctgacctggggcccaagactcttccttatgaacaatcctgtggcaaccctgatctgttggtcctcagaccacacattgaatagcaagactgcatagttgatggtacgtgaactgtagggtcaacttggcacctcgattctatgaattatgcaagcaaacatcttgtttcccttcactaaagtccttctgtctcttttgtcaatcattggtcctcagcttatatttttaatttaaaaaaattattggtgtaaaattcacataacatgaaattaaccgttttatttatttattttgtaatttcaccttttagatacagggggtgtaagtgcagtttattaaatgggtacattgcatgatgttgtggtttgcggtacagatcccatcacccaggtactaagtgtagtacccaataggtagttttcaaacacacactcccctccctcccttccctccagtagtccacagtgcctattgttcccatctttatgtccatgagtacccagtatttagctcccagttataagtgagaacaggaggtatttggttttctgttcctgaattaatttacttgagattatggcctccagctgcatccatgttccttcagaggacattatttttccttcttaaaggctgcatagtattccccggtgtatatgtaccacattttctttatctagtccacttctgatgggcacctaggttgattccatgtctttactgttgtgaatagagctgtaataacatacaagtgcatgtgtctttttggtagaatgatttgttttctttggggtatattcccagtaatgggattgctgggttgaattgtagctctgtttcaagttctttgtgaaatcttcaaacttctttccacagtggttgaattaatttacattcccactaacaacgtataagtgttcccttttcttcacagccttaccagcatctgttattatctgactttttaataatagctattctctgcagtgagcccagattgcgccactgcactccagcctgtgtgagagagtaagaccctgactcagaaaaataataataaaaatagtaatagccattctgatgctgtgagatggtatcttattgtggttttgatttctcagctcattttttcacaagtattctctctctctctgagacacacacacacacacacacacacacaccaggtccttttcctaatccttttcaaacctgccagtgagaatctaatgctttagtcacttgaaaagtactctgtatgcagatttgaaaagaaggctatatagagagaacactgggatagtgctacagtttggctgtgtccccattcaaacctcatcttaaattgtggttcccataatccccatgtgttgtgggagggaccagtgtgaggtaattgaatcatgggggcagttatctccatgcagttctcgtgatagcgagtgagttctcatgagatctgatgtttttataaggggcttttccccaccctcactcggcacttctcctgctgccatcatgtgaagaaggttatgtttgtttccccttccgccatgattgtaagcttcttgaggcctccccagccctggggaactgtgagtcaattaaatttattttctttataaattgccagtctcagacacatttttactagcagcatgagaacagactaatacatatagtaaacacaaacttcagctatgtgttaataataatgaccatttattatgtgctgattacatgtttgtcactagaagtatttatctcatataatcctacgaaaaaggtatcattgtcacatgttaaaggaagagaaaactgaggttcagaaaggttaagtaacttgtttcaggtcaaagcattagtacatgacagagtggcagatgtccacacttctttgaagctcatcccaccaggctggccttgtgagtagctttaactgatagaatgtagcagaaaagacttccaaactttgacctcaagaaggctggtagcttctgctcttgccttttgaacactgctatctcatgaacaaaattaggctcacctccttgaggaagagagactttacagagatagaggcccagttatcccactgtggcagccaaaccagacatatgaggcaagtgaagctatgtgggaccaaccatccttcagcctatttgcaagctaactgtggacatatgagtgagcccaggtgagccatcctaggctgagccctgcctaaattgcctacacattatggaaaataaagagttattgttttgacccagtaagttacaggatggtttattatggaacaatatacaactgagctaagatttgaattataaggaagtctagctctaaaactcttctgagcccaaagccatgatccatcatacactaactcgtggtccataactgattttggtcctgcttgttcctttcagagttctagctctagacctggtataatccatatgtcacttctgatttttctgtgcctccaacaccttcaccacccttgggctgactatcttacctttcttatctttgggctccagtcctccttcaagattgccctaggtgtccttttttgagctgtctgcctggtaatctgtatgtgggggttcatgttctgatcctgcttggggtctctaggagactgtttcttaaattgtactgtgcttacacatctaacgattttgttaaaatgcacattctgctttaggtggtctggggtaggacctgagatgcttcatttcaaataggctcccaaggtgatactgacgctacttgccaaaggatcacactttgagtagcaaggctgtaggctactctgcaaagaaactatttcactgcttcctcattcacataaataatagtcatagctgatggggatcatggctggattcttcagccaaagagggagtctcagctgtgcatttatcagtgacctgcatacttgccagtttaacccagggaacaatgttaaatggaggaaaagataaaagataaagattcaattttcaaagtattcattcaataatacaacaaatatttaccaagcatcaatgccaaaccactatgtggtagcatctaggtaggaaacctcaggacatcctcttctgagggcttggatcacgtaagaaaataccattttataatgggatgtcctttctctagtcacctcacagccccctgaactaattagctgaactctttgagcttcatatataacgctgactgaaacaatttgtttgtaatgcagcagtttgagtttgggaaccagtgttacgtttgcaatgtaacagtatggttagtgtttagttatctgtacataggtgaatgatcaatcttgaaaagtatatgccttggcagcccaacccctttcctaagaatcagagatacattggtggggcgcagtggctcatgcctgtaatcccagcattttgggaggccaaggcgggcagattgcctgaggtcaggagttcaagaccagcctggctaacatggtgaaaccccgtctctactaaaaatacaaaaattaaccaggtgtggtggaacacacctgtagtcccagctacttgggaggctgaggcaagagaattgcttgaagctgggaggcggagattgcagtgagctgagatcgtgccactgcattccagcctgggtgacagagcaagattctgtctcaaaaaaaaaaggatcagggatacacatgatacttgtaggtaactctgtaaatagggctagataggtgacttatttgatctgaatccctacattctttgcttcaggagtcccccctcgaaagagaatgtcctggagctctccagatagataccaccacatactgtttggcataggtgtcttgtgaatatttattgtattatcgaatgaatgccttgaaaacagaatctttatcttttatcccttttctccttttacctggtaagtccttctaagacaagtgctgtctcagccctgactagatgaaggactcagtttccctagggaccaatcagctacaagaaccactccaccttcctctacatcaacacacgtgcctgtacctggaatggtgagaaactgtcattcttttttttttttttttttgagacagagttttgctcttgttgcccaggctggagtgcaatggcgcgatctcagctcaaaacctccaccacaagggttcaagtgattctcctgcttcagtctcctgagtagctggaattacaggtgccaaccatcacacctggctaatttttgtattttcagtagagacgaggtttcaccatgttgcccaggctggtctcaaactcctgactgaccttaggtgatctgcctgcctcggcctcccaaagtgctgggattacaggtgtgagccaccacacccggtccgagaaactatcattcttaacttctctctcctgccaagaatctacctttttccttttcttctagacctcacaaggagagggatgagagcttgctttgttttacccagtcctgggtttgcagtgcaaaggcctacttctggaatgataaacttcatctttaattagtctaacacagataggatccagagaagcaatgtggtgtgagacagacagggtccctcccctcgagatggcccagtgagagatggagacaagctgttgggcactacaggtatggctactacaatgggggaacacagtattcctctgagcatttaggaaggcacccactcttgttttgggaatgggattggggtgggaacaggaaaggcttccctaagaagttatcacctaaggtggatattaaagaataaataacagttagccaggcaaaaaggaaggaaagggtggtaagagaacatcctgaaagagaaaagccattgtgtaaaataatttgaagaacaagtcattaattcaagtggcaatggtaatttgagatatgcaaaacatcctatttcttagtatttgagattttgctccatcttttacaattgtgcttacttttagaaagtgaattccatagtggaaagcttccctgaggaatatgtgataattggacaaagctttgctgacatttacctttgctgcatctacaaagaaataatttgctgagataactaatagagcaaccaaaagcagatgtacctaatctacttcaaggacacttttttttcagcattttgtaagcacactaaatgcaaattatattatgcataaaattaaaaatcaacctcatctagtcatcaaaacaagttgtggcttaacatctaccaggaaacagccactataaaaataaatttgaatttaattacacaatgcagctttttaaaagccctttccttttaactttgtattaagttgtattaagttagcctgaccttcttgtaatttatctcacctccaaggtttcaccaaatttgatagatgctgaattacctgtgactgacttatgttttttgttagctttgaatatgaaaaaggaagtttccaaattcttttgttagtatcggtttaaacaggactataataatcaatcaaaataagctcatttattaacacaatttgagtatcccttttcctaaatacataggatcagaagagttttggatttgggattttgggggattttgaaacatttgcatatacataatgagatatgagacccaagactaaacacaaagtgcacttatgttttgtatataccttattcacacagcctgaagctcatttaatacactattttaataatgcgcatgaaacaaagttgtgtacactgaatcgtcagatggcaaaggtgtcattatctcagccactcatgtggacaatctgtggttgtttgacatcatcctcattcctgactttgaatttatatgctacaaattaacaatcattttcacttattcacacataagtacttaacagtaaaaaaacaacatcccattaatacagttaaaaaatagtatgttcaggataactcagcagcacagtagcttcactagaacacctgcatcagctgctaaacaacggtagcaacgaataacagcaggctttcagcctccacctatgatgctgtgttgtgattaaaaggttactgtccactgtgttttatatttttaggtgagaagaaacatcagaagaagtcgaaggaccaggaagtgggtcttctagggactaggaggcattctgctgaatggcttttaaaaatgtttcctctagactcttctgcctcattaacaacggttgctgtctcagaagtctctttgattttgtaaactgtcatgatttctcgttcttgaatgaatgcacactgctctagtccttcaataagcccatcacacattttcaccatgttgtctataggcactttttctgtagtgttaacaaaatcaaatttatgactattatgacaattaccttgattcagaaccattttggttattctaccatcaggtggtgaatgaacaactggagcctcattatcgatgtcaaaaatttcttcaggctgggcatggtggttcacgcctgtcttctcagcacttcgggaggctgaggcaggcggattgcttgagcctaggacttcgagaccagcctgggcaatatggagaaaccccatctttgccaaaaatacaaaaattacctaggtgtagtggcgcgcacctgtagtcccagatacttgggaggctcaggtgggagaatcccttgagcccaggaggttgctgctgttgtgagccatgatcacaccactgcactgcagcctgggcaacagagtgtgaccctgtgtcaaaaacaaaacaaaacttcttcaataggccgggcatggtggctcacacctgtaatcccagcactttgggaagccgaggtgggaggatcacttgaggtcaggagtttgagaccagcctggccaacatggtgaaaccccatatctattaaaaacacacacaaaaaaattaaccgggcatggtggcatgcacctgtagtcccagctacttgggaggctgagccacgagaatggcttgagccagagaggcagaggttgcagtgagccaagatcagcctgggcaactgagcaagactccatctcaaaaaccccaaaaatggcagggcgtggtggctcatgcctgtaatcccagcactttgagatgctgaggcgggcagatcacaaggtcaggagtttgagaccagcctggccaatactgtgaaaccccatctctactaaaaacacaaaaaatagccaggcatggtggcgggtgcctgcagtcccagctacttgggaggctgaggcagggggagtcccttgaacctgggaggtggagtttgcaatgagctgagatcgagccactgcactccagcctgggagacagagcaagactctgtctcaaaataaataaataaataaataaataaacccccaaaacgaaaaaacttctttaatataagaagaaagtaaaaaaacttcttccagcttcactaatggactccaaaggtatattttttgcatatgtaagaaggccagacatcattttttttctcacttgacatacagaatcattcaaacttgtcaccttgctcgtcatcatcactgaacacagttgcaggccagaagttgtgccagacatgcccaaccatgtgtttagtcattgtgttccaagcactggcaatagcatatatagtatccttcaggctaaactccttttgaaaactttccacagccacgcctctgttcactattgctagcatgctgttcaaaaagtttattgatctaaggatagcatggtcatatggctaaattaataaagttatctttgtgagaaagtatatgacataaacatttctgctgaggatctcaggtgaaggatgagcagaacagttgtcaaggaataacaagatcttggagtggacatccggttcagcttttctgcagtgtgcatgaaccactggtacaaaatatttgagaaactgccagaaaaaaatgtccttggtgatccatgcctttttgttggcataataatggactagttaagaaattcactccttgtaaacatcaagtatgcatgcttttgcctatcacagcaagtttacactctgtgtggctgttgcattagcacatcccagcacagttattctatccttagtatcctgaattcctacaggagctgcctcatcagctgtagtcagagtctttctggggtaataatgccaaaacagagatgtttcatcagcattatagactttttctgggataagactcatcagcaatgaccttgtcaaactgatacacttttatgtgttttattttattttgttttttattttttaagagacagggtctcactctgtcatccaggtaggagtgcagtgcagtggcatgatcagagcccaccgtagcctcaaattcctgggctcaagtggtccttcagcctcagcttctggagtatctaggactacaggcatgaaccaccacccagctaattttttttaaaaagatttgtagcaattgggtcaccctattttgcccaggctggtctcaaactcctgggctcaagcaatcctcctgcctcaccctcccaaagaggtgggattacaggcatgcgccactgcatccagctgatgctggcaaactcatcaatgaattgctccgctgcttcacgatcagcagaagttttatcaccacaaatctttaaaaatttaatgccatatctattcctaaatttctgcaaccagcctattgactaatcatagttctcttcacttttcaattcatcgtgacagatctttgcttgtttcatgatctacatactatgaagtggcatgtgtttgttcactgcaacactgacaacccactctttcaatacatgattgaggtctttatttttagctttatgcagtgtttttctatttttaattaacttctattcatcactttcagcatagaacttcaacagtcctgtttcttcatgtcatacagggtggtcattctaacaccacactgctgtaagatgattcacacttataccactgtccagtttgtccaatagcttgactctctgtgctatagataaatattcttcctctttctcttaccactgttacccataggggtatctgtagggctttttggtattttcaacaatatctttacagagagtaagcaaaaataaagtaagtaatgcacgtgggtcttggtcccatgtagggcatcatggggaacctgctgtttgcatatctggcctgcacacatgccatgttattaccttttgtgggtgtgcttgcatgaaggaatctgggcatgcctagaaaatatacatcacaattaaagggcctgggagggtgtttctttgctcggggacactgaaggaattgtgtgttgtgcatctgtgttttgacttcgactcatcacgtgaggtcagctgtgaagttttccacttgtggtgtcatgtcagcactcaaaaagtttcagattttcaagcattttggatttggggttttcatattaaggatgcccaacctctttattcagttgtcttatggggaattgagtccagtgaagggtatcaaggaatcataaaatgttgagcagggaagtagttcagaaatttccaaactcaaagtcctctagagagatgaagtatttcccctaagttcacgatgcttagtgaaaatgtcagtacaggttcatctttttttgttgcaattctgaaatctcaaagtcgaaatcttaaaatccaaagttttgttttttaaaaatttagtgcctaacttatacagcaaaacgtgccctacaccaacatgaggctatccatcctacttaatatgaatattcatacattttcctgaagacacgctgatgtgctggattacagaaaactttccaggacctccatggaggtgtatatacaccatgaagcttttctacagtctgaagaattctaagttacaaaacaaatctggtctcaagggttctggataacaagttttatgaatccctaataatagtcattaattactgggcatttgctttgcaccacatattgtcctacaattttagatgcattttcataactttgatttgacacattccactctgacctcacctgctatctttccagctcactaattctattaccccaattccaaaccttttaaaccaagggtctctccaccattggtccttctcccacttcacacttgaggtcctatcttctctttataattacctgacttaaatgctttggtcaattattatgctgtaaatactcacttcagaatccctcaaatcccttgcccttctctggctttgacttatttgtttagcaaaacacaaccctagtgaaacccacctctttccctgcactggaatggttgaatatgtctggtgaaaaccatgctgactgatctcgttttgagttcatagtcattaacccttaactgggcccttaatgctgcctggcattcatagccaggcatgaggttcacagcaggatgaggttcccctcatccattcactctcctgttctcctagagaacaagctcatacttccttcttcccctcaagaatactcctttccccacttactcttaggtgattactatgctacctatttctctaagaaaagtgagagaagcagaagaaaacctccacagactcccacaaccacatactctcctaccagtcactgtacccacactctcagccttcctgcctagtccctatgaaaactccccatgagtccctggcaccaacccctctcatactcaagcacattctcctctttcctgcatcgtcaattttcacccaatcattcacagagttagatcaacaacacaaacctcccatagccacccacccacatcagcaatctgttaaatgattagttagacgggctcccccatttcacaccaagctctgacaatagcctcaaggtcctatacaacctgatctgcagttacttcacttctgcctctccaaccactctgtcttctttgatctttgctgtcaaacatgcctgacatactcctgtcctctggcctttgtaatggctcttccctttgccttgaatctgctgcctctagatatccacatggcttactccctcaccagcttcacatctttgctcatgttatcttctcaatggaggctaccctgtctcccctatacaaaattgtaacccactaccagcctcccatatcccccaaccctgtctttggaacccttaccctgcactgctattttcttagcacacagaacttctaacatattaatatattttcttatggttatggtgttttatttgcttcccatccccctcccctcactagactgtacatgccacaaaggatctgtattctgttcactgacatatcccaaacacctggaacaatgcctgacacatagtaggcattcagtccatgcagaatgaatgtcatagtttaaatttcacaaaaatctaatgtgttaggttttatattatctttattttatatatgaagaaacagactaagttttaaaaataggcccatggtcaagttacaagaaagggagacagccaggagcccagtcttcctgattccacagtctacttgctaaatggccaggccatgtggcctccctacagtgcgcttgcctcaaggtttggaataaacatgttgaactgcatctaccgtcaataaaccatcatcaaatgccacagaagtttattgtgtcctcttggggtacatgacagcttggtagttttgatctaacatcaaattctactcaatttacttcctgactccagaagataacaggtccaaaagctcatctattctaggccaaagaggttggtttcattcatgtatcttttttttttttttttttttgagacagagtctcactctgttgcccaggctgtgtgcagtggcacgacctcagctcactgcaacctctgcctcagtctcctgagtagctgggattacagcagtgcaccatcatgcctggctaatttttgtatttttagtagagacggattttcactatgttggccaggcttgtctcaaactcttgacctcaagtgatccacccctgcctcagcctcctaaagtgctggccaggctggtctagaactcctgacctcaagtgatccgccttgaggtcacttggcctcccaaagtgctgggattacaggggtgagccactgcgcctggccatttatccactgattcattcatttattgagcaccgacatgctgagggtatcctgtagatggttgatttggatgcagtcagtaaaccaaatttctcttcttgaaactaccatgaaggaaaaaatgcccacatcatttttggaactaaatccacagatgaaaaatcatcttttctctaactgcatcagaactaatgctactccctccagctcaggaagagcctcctatcccagcccctgtgctagggcctccattccagtggaagtaaatgtgagctacatgactgatagtttactacttctgaatagctttgtactggaatttggaaggaatgtgtatagtgctcaatatgaagctcagtttggcttcagggaccattttaattaaattaattatctctaaaagaaacacttagagttgtttaagcctaaacaataggtacttgttctcatttctaataggagtcacattgttcagagagttctcttggtgagctgaggacaatgttaccaccagctatttaaggaagaccttccccttcttgccccatgccttccctctcacacacaggagagaggctttcagagaagtgggatggagggcctggcacattaatgtaccaaatctacaaatgcactccactgctttcttttttgttgttttttgatttttttgttttgttttgttttacagccagaggtcttttattttattttattttattttattttattttattttattttattttattaacacctatgatgccatgaattcacagggaataggttccagcagctcaggctccttcccacaagctttcacaaagtgcgcttctctgggtggagcaggctggtgcttcacttgaacccaggtaccttcctctttggcttctttctttttctgatcattttccttcacacatttcaggaagctatctcggctcttacagtgcttaatgtgctcaatatgcacattaattctcttggcaagaatcttacccttgtttacaacaatgccaacagcatgctggggaacactgtagactttcagttttgccatggtaacacttgtggggcattcctttttgaacagtatccattccgttgatgtgtaccatatcacctttcttatagattcgcatatttgtaaccaaaggaacaagtccatgttttctaaaaggcctagagaatgtataccggtgcctctcctcttccccctttgtgttcatcattgtggcaaattactggaaggtggcagttttggccgaaaggaaggactgcttccttaactttcctaactcatatgtgtcttgtgtttgtttctgttgtggattcttagtcacatggccttgttctgtatggtctgcattttcaggaaaagcatcccagcctaagtggcccttgtacccgtgaagaaataggcagtgtcacttttactttgtgttctcctttcctccaccatttcctcctagtgtgtccttgttttcagaaacactagactgatttttaaaaataatattgtatactccgcctcattgcaagaagactcaatctggcttcttcgctccattctttttttttttttttttttttgagacagagttcactttctcgcccaggctggagtgaagtggcgcaatcttggctcactgcgacctccgccccacaagttcaagtgattctcctgcctcaacctcccgggtagctgtgattataggtgcccaccaccacgcctggctaatttttgtattcttaatagagacggagtttctccatgttggccaggctggtctcgaactcctgacctcaggtgatccacctgcctcagcctcccaaagtgctgggattacaggtatgagccactgcccctggcctcttccttccattctatctgttctttttattattgcagtacaaagaagtaaaatgatatctccctctcatcttctgctcctcacagtcagccatgcccccacaaccttgtcatcactaggaaaaggagtgtaggagggctctcttcacccccgacattcacttttcagagctgtgtgttatttttaaggatgcatcatggctttgtgggaaagccttagtgtgtgtgtgtgtatgtgtgtgtgtgtatgtatgtgtgtgtgtgtgtgtgtgtgtgtaattccagtcaaaggtaagagtgtttaaagcttttctgtgttgtgctaagcccttctccctgagtcttctctcttagatacagtgtgattcatctaactccagtgactaatggccatgccaagtacagggtgttggtctctgttctttggtctctctctcagtgactgaagagtggacaaggcacacaaaagagagctctaaaggcagtcaatcaatactgcagactgactgacaatggcagtattaagtgccatagtggttgggtttactggaatgagtgcaaaataaggaccagagctggccaaattagctttacataataacactaggcaattggtattggaagagatggctaaagcccaggccacaggataagcaggtcccttccagctttgactatagttttggtgtttgtttttttgttttgttttgtttttgtttttttgtgagacagggtctctatctcccaggctggagtgcagtggtatgatcctggctcactgcagccttgacttcctgggctcaagcaatcctcccactcagcatcccaaatagctgggactacaagcaggccaccacggctggctaatttttgtattttctgtagagacagggttttgtcatgttttccaggctggtctcgaactcctgagctcaagtgatttgcctgcctcagcctcccaaagtgctgagattacaggtgtgagccaccgtgctcagccttcacctttaactatctgtagttatttagcaagtaggacttggtctgcagcacagcggtaattccactactctttaactaaagtaagaagtaacaatgacactcagaattatttttaatttacttttggtatattctaattcattaatgagcaaacaactgaaaaaagaagaaaaacatgttaatcttccatcgttattggaaaaaaacagctttgttgtaactaaaatttcatgtattattaatttgagacaaggtctcactttgtcactgaggctggagtgcatggagtgcagtggtgtgatcatggctcactgcagcctcaaactcttgggttcaagcaatcctcccgcttcagcctctaaaataactagaactacaggtatgcaccgccatgccaggctaattttttaaattattttttgtagagacagggtcttcctatgttgcccaggctggtctcaaactcctggcctcaaatgatcctcccacgtcagccttccaacatgctggaattatactcagcctcatgactaattgttaatgtctgttttttttctttctttctctagaatgacccaacccatttgacaaaaacattgttttgaatgcatagtcaaattccaaatcatatcaacatcgtttacagataacaatcaagtgggtaggccaaatccaaataaccaatttttaaagtttttctagtatgccttggtaccatgtattttgtatcttaacaatattgacctctacaggtacggaagcagagacctagtaaaaattaatggcaaaagtcagtgtgttaacagattagattgcggcaacccttaatcatgaactgctaaactttagaccatgagctacctgtttcctaagatcattttagtgtacagaagaatttccatatttgaaaacaaattttgaaaatgggggaaaaagtgaggtaaacgagggtattaatcatactctgctttccatgttctaatgcttagtaaatttacttggcacacacacattcttacattaggaaatacatttaagtgagtctaagtttcatcgtttcactcactgaaaaaaaaaaatctactttatacaatttggagaaaggaaaagattattctgtagttggaaaggcaagtattatactcttaggctaccctcttaactctgctttggacaaacacaataaaggataaaaatgtttatgctgcttttcttccctgtgttttccccataggacagtctgtatgtggtctaaaatcatgacctatcagagacttacatatttttaaagtagactggagcctcagtgtcatctctcttcatcatgatactgtattattaccttttatcagccacatcagggaagtatacttgttcatttaaatcaagggtcaaaccaaatactcacatgtgtgggaggagttcttttcataacatgacaatgtctctatcttttgttttggcctgtattgatgatttaatgatgaacttcctccctgatgtttattcaaagacattgttatccttcttttcattctaagggatttgggggctattattttttagcagtggctggtataggtgaaagcagtgacaaagcttctcaaagcaaggaataaggcagtgaagccacggacacatagagccatgggagaaacaaggccatgggagaaacatgactttcctcaggttaaagtcgtggggttaaaacccttttatattaaaacaagtatgattataaaatgtacttattgaacaaacatttatggtgcatttatcatgtgtcaggcaatattcttgattctggaaatatactggtgaaagttaaggtggccagacacggcacccaatttcatggagctggtattctaacagagaatgacaaaaatatgaataagaaattcagatagtgaaaagtgtaatgaagaaaatatacaatgtcacagtgacagcgcagaagagctcattcagactggcaggttgggaaaagtttcactgaagaagggacatttgagctgagacctgaaatcctaagaggagggggtcattctaggcagagacaacaatgaataaacaaccccacgggaaaactaactttgcctttctgagtaaccgaaaaagacaatgcagtcagactggagtgggtggaacactgatgataagaaatgatgtcaaaaggcaggcaatggccagactgtgtagaacactggaagaacagctaaagaggcaattgcaattcaggtaagaactgatagaagataatggaaacttagaaaaaaggaaaagcgatggatatgaaggaaaaattaatgtactgcaggtgtatttttgaagtagattatgagattatgggaaatggaggagaaatgacagctcctgggtttttgtctgagtgaaatatatgagtgagaggagaaggaccatatagtgagatgaggaagaatgaaaaaaagaaccaatttcacagggagaaagtcaagagtactgttttagccattttaagtatgaaacacctttttattattcaagtagcgaatggtcaagtgggcgtttaggtatctaaagttatagctcagtggaaaggtcagaactggcaatataaatctgtacataagatggtatctaaaccatgcaattagatgagatcagtagaaaaacagaaaagtcttgggcctgagcctggagcacaccaacacttaaggcttaagaggaagacctacagccaatggatagagcaagaagcaagaaactgggagagcatgctgttaaagaagccaagaaaagacagatagtgcatgaagaggacttaataaatgcggcaggagttaagagagagatgactgatttggcaaagtggaggtgtttgtaatcttgacaagagcagtttcagggaatggtgggatccaaaacctagttttagggtccatagaggtaagctggaaatgtgaggaaatttttgagcaggtttctgtgaaggtgtgagagaagtggcaaaagaagatgtgaggtcaagggaaggtgtcgttttgtttacaaatgggaggcagaagaaaatgtttgtatgctgatggaatggtccagtagtcagaggctggtgttggaaaaagttgaagagggaagttatgacacagtaattttggagagtaagagaacaaacatgtttgtgaagcacagtaagatctttgggtagtacctatttgaaatttgtggtaatggatttaaaatgaaattagtcagcattggcttcagatttttctccagccccattcagctgttaggtgtaagcgcagagtaaagagatggagcagtgcttaaaacaagttgggactcgcaggtaggagactatgacagagagtagacgaagttgatacgattacagaaaagcaattgctaatgataggctatgataaattcccaagatatgtgtttattaaatgtttgatgaatgacacagacctggaatcagactttacccattcctagaagggtaagtcgctgaacttaagtcaataattcctttacagaatttctgagaggacttaattataatttttgtatagtgcctaaaataggacctggcattgaacagtcactcaatacatgttagttttcaactccactttccaagtacaatttctcttcctcgttcagttactcaacaatcatttcttcaaaacagtctgtgccaggcacatactgggcgctaagatataatagcaaggctgataagaacctgctttcatggtatagcaggagaaacagatattttacaaataactaaacttaatatttatgttcagttgtgataaacactgtgaagactgacctagggagatgttgaaaacagatttttaaaacttttaaacttttgtaaaaatgttcaaagagaatctgttgttagaagtttaacattctgatttaactgttttgaatacgaaaaatacaaactcaaagtaaacatctaaaatataaggcaaatctatccatatagaaaaggaataagaaggtactgaccaatgaagttgaaacaacactgtcatattaatctcaaaaatggaccaaactggcctttattttagggtcagaatgcatgtgagagttgggctcaattcttttagaattgttccttaggatacttcttaagctttaactttatgccaggcattgtgctaagtgacagaaagagaaaagcagcccttggcatccaggacttggcttgttattaccagctaggccttggtgttctcctgttgaacataaacaatctcacagaagaccatcagtcaaggttactctgtgaccatgatgaaacagaaaagacctcttcacatcttgtgtaataagacaaaaacaaagtcgcagtgcaaagcacaaaatactaaatatgagtgactgctgcttctttacaaattacggctttcacttagcttcgtgtctcccacctcctaaatgagatctattcagaccaatcataaaattaccccacttccttacagaatcgaaatccagtgcaaactcttgcttgaatccttcccaaatcactcatcacaagcccaaatcctgaaagaaggcctttccagcactcaggaatccctacaatgtatctctagtttcaacaaacaaaaaaacccaactttgttcaactccttgtgtgttcctagtggtctcctgtgttgagtggcattaccagtggaatatatgcattatattgtgtaatcctcataagtacttcttgaaacaggtactattaacaaatccattttacaaatgaggaaatggaggcacagagctgttaagtaacatttccaaagccacacagctggagagtggcagaaccagaattagattccagtctgaccccagtgagattccctgataatgttccagataattatttagaattgttagtaggctagtctttcagtttaacaaagggcaaaacagtctttctatacctctattccttcgatcttacatactctttggtctcattgctaaacagtgaaacagttgagttctttatttaaggaatttttacttgctagctttacaggttaaaacaaattaacattggagcttgctaattttggcttatttcagggtcagaatgagcttcatcaatgacagatttgaccaggtccactcacattctcaaaatctttcaatagcttcaggctagagtcaaaaaaatttcagcatgatacacttgtcccttctccctttcctgaccttatctcttgatgcttctgcacaattcattaaacaggtattttgtaccagaccatctccccatattttccaatcatacagaaatcatcagtacttttttaacacagccttttcatgtgttaagcttcaacccatgcaacctatgacctttccaccccaaatatattgctcctttgaagatccaccctatcacttactttccttgattattagcacttttcataccatgttacatgcttattcctccagcctcaactctttagaaaccaaaaggcattattctctttgctatcctttatacttggcatgatgcccgaggttgggccaagcttagaccttagaccatttcttcaccaaattcaaatgtctcccatttctttagtaattggtatggtttgggtctgtgttcccccacaaatctcgtgttgaactgtaatccccaatgttagaagaggggctttgtgggaggtgactggatcatgggggcagatttttcccttgctattctggtaatagtgagttctcacaagatctggttgtttataaaaatgtgtagtacctcccccttcattctctcttcctcctgctctcgccatgtaggaagtgcctgcttcccctttgccttctgccataagtttcctgaggcctccccaaaagccaagcagaagccgtcatgcttcccgtacagcctgtggaactatgagtcaattaaacctcttttctttatgaattacccagtctcaggtacttctttatagcagtacaagaacagagtaacacagcaacacatttctagttctgttactgcactcaaaaaatctaagtttaataaattgtgcattagtcataatggaggacaattggttttcagattattttccaaaaatttattgtggatcagaagataactggattttttggatgtgtgcttctcaaccagcaatgtaagttcaataggtctttgggttacagcagtgtcaactcttaaagtaaactacgatttttttttttttttttttttttttgaggaagtcgtcttctgctttgccaggccactggttatacatgattaggggacacagtgtaataatgagtctccttgataactagtaataatgaatcctaataccaaaatgccaataccaaaaacaaaacacctcacagtagaatgattacttggggaagcagactgaagagcataggaactagttactactctcttttgtatattgaaacttgaaattgatgcaaaagcaataaaaatattctttaaagctaaaaatgtagttgctggggataacagaaataaagtcatacagctagtgtgaaataactgagacaatttatctatttaaatataatgggctgtcctatgaagaaaaacatatcaaaagagtggcttttaagcatagattaaaaaaattggtccagattcctttcagtttcaggaaaaaaggttaatcatgtattttaaaactgttaaaactagggacaaagaaaacacacttggcattaaaatgtcagtaagtttttgaaaaagattaccttggaaaagcaatttttgtgagtaaataaatttgctgtaatagtatgttctatcttcttcatattagcagtctcctatttctataggatttgtttaaaaaacttcaacaattatatcaaagtttcaaaaagttcaaagccttaaacctcttgttgaagaaagcaaaagaaccattttgtcaaaacaaacataaaaactcaaattctgaaatctaaatgttattccaagactatgattgacttcctctatctcgccaacacttttaactatttaaaaattgtctttttcgttgtattccgttttaagctgttatgattttatatatcaccccaaaatactctaaataatttttttttttttttggcagggggactgggtctcattgctgcccaggctggagaacagtggcgtgaccacggctcactgcagcctcaaccatcctggcagctgggaccacaggtatgcaccatcattcccagcttttttacatgttatttttatttgtagaaatgggttctccctatgttgcccaggctgctctcaaactcctgggctcaagggatcctcccaccttagcctcccaagtagctgggactacaggcgcataccaccatgcctggctaatttttaaaagtttttttagagatggggtctcactgtgttgcccaggctggtcttgtgggctcaagcgatccttctgtctcagcctctcaaagggcagggattacaggcgtgaatcactgcagccagctctttaaacaaattttaacatactattaaattatcagtaaataggttttaacaatgtcagctcctttacttcatctttctgttcaattaattaaaaccattctctaattgattttgaatgatttaatgtcatttgatcctgatacaaatttattccaaaaatgcaattttgatgagaacattagaattttaattaacatggacttactaaaaaaagtagttcaataggggaaacaaaggaaagaaccaaaacactgttcatgtctatccactcatgtgtgaaaatgtagcattcaaaaatgacagcacatttgaagcataattatagggacaccatagtggtggaagaagacagtgtaagaaagacaactgtcagagtgcggtactctggaacatcaaaaggctatattcgtcattgatggctgtttctttgagaactcccaaactatgtaagtttctgaaactgctccaggcattcaataaagcaaaaagtacacttataaaagtgtttaaaactttgtgatttttcaagtatattttatagttttatcaaaaatatatctaaagtttttttttaagtagctaaattttcaaactgcacaatgacaagctcttaaatgggggattctggtcaaaaggcatttggtcagcaaaaacaattttagatactgtagttttctgctactagttaacacacttgaaatttatatgatacacaattgtgctcacagaaaatatattcctcaatcatggtctaaagccagaaggttattagtactgatgccaacgaccaaaagtagggcctttcctgtcatttctcaggcacctgcttgtcatttaccctcaaatgacagcctgcggacagccaggtcccttgggcacagagttcttgattccaacgtttcaattcattacactagtcagccactatttcccgcaacacactttcaaactttttctaacttcacagaacttcccaaaatgtaacttctttcaaagaatggcaaactgaagttgaataattcagtcttaatttctagttaatattaatcataaaatattacatttttatattgctaattcattttcaagtagattaatttctacccatgtagctgcagaattagaaaggcaagtctctgtagagctggtttactaaacagctgaggaatgatgctcgaagtacccttcattatcccaaagcatttattacataagaaaacattatgtagactttatgtgcatattatctatagagaacgtaaagtaggttttactaaaattaatgtcactacacatcacagcttacgttttacaataaaaagagaaatcaaaaataaaaaaacaaaggatacagttagcacattattcacttgtttgcttggaaaatgcaatgagcacacacacacacacaaacacacaaatcggtatttgtagacctgcctttgtaatttaaaatgttaatgaaatgtaaattttttcagtacaaaattcatgactgttcatccctaggctgcattgtgtccaaccttgtaggagtccttttttaaattttattagtcccaaaagtccctcattgtccctttcccttccatcctaccagcaccaaagaaaatacatttgacaaccacaattggatcggtggcagtaaaacataaaataattttaatttagaaaacaacacaccccttgcactttttgtaacgaaattaagtttttaggttccaagctattcatcatgaagagaatgtgtttaatctgatgtgaagttggctacccaacagtctagtcaggctgtagaatgtttaactcggggtctggtaggctgccagccattctaaatgttttcacacggacaagcaataaataattaaatgtctaagtcacagttctcagattgggcagtagatagaactaaaacttaaccacttacagagacagataaacaatttttgagtggctggaatccaacaatttacctttcagttccccaggcataggcgatgctctttcagttacagtgagccagttgtggtcatgctttcttacaaggattctaaatgatcacttttgggatttttaaaaatcactaacaacctgcaatggaagataagtgataaacttcctaagccttattgtcattataaaattaggttagagaggtaagggaagacatctttttttaaaattttaaaaataagaatagagacaggttcttgctatgttgcccaggctggtcttgaactcctgggttcaagtaatcctcccacctcggcttcccaaagtgctaagattacaggtgtgagccaccacatccagccggaagatataattgataaaaatattgaaaatatacatggtcttctttccttcctcccaattctaacgtggagggtagagccaagtgtagttttaaaaccaaactactgggctgggcacagtggctcacgcctgtgatcctagcactttgggaagctgaggtgggtggatcatctgaggtcaggagttcgagaccagcctgggcaagatggtgaaaccccatctctactaaaaataaaaaaattagccaggcgtggtagcaggcgcctgtaatcccagttactcgggaggctgaggcaggagaattgcttgaacccgggaggcaggggttgtagtgagccaagatcacaccactgcactccagcctgggtgacaaactgagacaccgtcgcaaaaaaaacaattaagcccatattaaaattctaatttactcatcaaaattacagttttggaatgcatttgtatcaagatcaaaatgacattcattaaatcattcaaaatcaactggagaatggttttaactgaagaggaagataaaacaaaggagctgaccctgttaaaacctagatacttgaatagtatgttacaatttgtttaaagggccagcaaaggactcacgcaggtaaatccaaacactttgagaggccaaggcaggaggatcgcttgagcccaggagttcaagaccagcctgggcaacatagtgagactctgtctcttaaatctttaaaaattagccaggcatggtgtgctcatctgtagtccccgctacttgggaggctgaggtgggataattgcttgagactgggatatggaggcctcagtgagccttgatcacaccactgcactataacctgggcaacagagcaagactctcataaataaataaacaaacaaacaaacaaaaaacttcccagctgattttatgcacatctccactagatacttccaaggtttcttccagctctgagactccaccttcttttaaatggatgtggcctatagcttagaagcaagacccaatgctaacagaatttgggaaacaaactaacaaaaaatgcctctcccatcctcctcccccacgctttcttcagagctctttcttgacacacctgtcaacagttttgatagacagatttaaaacatgtaatgcatttgtttatagatgacctagttcatctttgctctaaaatgcatatagaagaaacactggtcagatgatcatggcagaaattaccatccagcagatatgttacaaacagaagactataaaaagctggctttgcaggactaataaatccagagtatctctagtaaaacttatgtatcttcagagaataacttagagtttttgtaacatgcttgatgtgcacaatactacactgctaacatcttatgtagacaaacgggtttatctacctgtcagggtttctcagcataagagttttaaaatttaaagtcagttctcaatatattgattccaacttgaaaaatacaaagctctcaatatttagtatagaaatatgtgttttttctatctttcacttataatttattcatagctgtttttctcattcttagaatttttaactttaggattacacaatggaacaatgctatcgttaatatagaaaccattgacaaatacagtcagaactacaaggctggaaacagaaattcatacttatattgtctttaagctgaagttaattttaaaagctttaaaaatattacagggagaaaaaacctcttaagtacaagtaaatcaagatgtaagaccaaaaaaagttacatttggcctggaaattgagattttatccattaaagcaaagtaactgacaagcaccctttgcaggaaaaacctactgaaaaaggcactgtaaatacaggaattaagaatttccttttcagagtttttttttttttttttcctgttccatagaaataacagggctatccccctaggcagtggcccagtctcacactttttcagatgtttttatagatttctatttcccagtgattgcagaaactctctgcaattatttcttgcaaagactatcagatcatccaacattagactgacagacttctattttgctgaaataacaaatcgtgtcaatagaaagtcatttttcatctccaaatactgcaataaaaacctgagatgcttcccttatgatcgatttttaatttcctaacttctatagaaatttttcttcatggtttttatatttttggcatttctaacttaaaatatctaaaactctttaagttatatgcatgaagcatttgtgctttgattttaaaaaaaagttaatatcatgctgtttgaacaatgtgagccattaaagggtatgactgtgctaccatggtattcttttttttttttttttttttgacacagagtcttgctctgttgcccatgctggagtgcagtggcgtgatctcgactcaccgcaagctccgcctcccaggttcacaccattctcctgcctcagcctcccaagtagctgggactacaggcgcccgccaccacgcccggctaattttttgttttttagtacagacggggtttcaccatgttagccaggatggtctcaatctcctgaccttgcgatccacctgcctcggcctcccaaagtgcaaggattacaggagccactgcgcccggcccatgctattctttagcacctccacgcactgcaacctgagcaaaccacttcgctggttaaagacacatctagttggtctctttccactcacagatggaatacttgggtttttttggtaggaagacagtttttggagtctaaaatatgacacaaagtaagaagcatataactaaaaccaatttaatctagttaatagcctcctcacctaggaatacattccaacatttgaaatacactagtcctcagaaccaaaagaactggtccatccataggttatcctttacaacttcaggtcataaggcacaggaagtgtggcctcagtcatgctctaggaaggactcaaaaaagagatttagaagtgattttgccacctcagaaattttcaagccctgtattaatcaatgaggtaatctttggtgtgccagcctaggctccaaaagtgggtggtctttgcagagggaggtgctcactcactctacctctggccagagccagttcctgcagctggaccaagggcagcccacagactgcactcggcacatttcttcatttctcacttgagtgcccttctttagtctcctttcaactgcccactttatatcggcttcattacaccaccgctccatttgtaatgtaaattgggaaactcggggaagtttttcttttggccttgtctacgaaagaataccgagaggtattcaaaacgtattaacacaaatcaatggcagcaataaaagcaaaatctccttagcaacataatcttgattgcaaaaggagaactgagagcatttagcagaacagtggcccacatggaatacgcatttgtctggaagaatccagcacaaagcctaaaagagagattttgaagaaatccaaaattaactcacagggaacagttactctttttttcaaaagtacacaattggctacattaaatctatcgtgtgcttttggctcagcaacattgtatcacaccgctttgcaaactgaaattacaacaccctgcatgcttcacatgagttagagggtgttttttgtttgttttgttttttggattttttttcccttggttgatttctttagtagagcaaacaaaaaagtctcaagaaatattcatctcatacacaatgcaaacaaaactgaatggctatctaacaatatctaagactgtaggtacaaaaggttgtgctatcttttgggctttctgtgatggattctaagatagtaactagtgcaagcagcaatggcattttttgcataggtctctctttgtgaaaaaagaaacaagtcacttctgagaatgctcacgtttttctggtcaggatgaaaaatgtgaataaaataataaaaattcagaaaataagttatcaattctttaaaaactacagtatgatgactcaaggaaacaagactaactcacaaaacttccctttagtttttatgtttcatatagaatcaactgtcattttgtattttaactgaaacaatccaggtgatggagttacctttactgtctactgcaaagagatgtcttagtgtactgagattctgcgtgtgtatgtgtatgtgtatttccatatatggatctatattagtaaaggtttagactggaatctgggtcaattgagtaaaatgaaaaatttgtattacaaatagtcacttgatacaatgccacagataagctatttcaaatagtgctaaacgtctatttacagaagtggcaactggaattatttctgcctcttactgaaagtttaaaaactgaaacgggataattgagaatcctatttacaagctgcattaattttaaacttaagggataactaaaacaccactgtggggaaaaaaaaggtaatattatattatataagctacatttttcccctattcttttttccaactatgatgtaagtccatgaacatataacataaaactttatttaaattcattgtacacagtttctaaactcatattcataatgacgtcaatttaattagtttttccccacacattgtacaggtcaaatctacagaagcaggtgtgtgtgcgtgtacgcattcattcatatggtcattttaacagacattattagtttggccaatttcctttaaagtgatttgatctaagttccagattcccttttccaattccaaatacactggcttacgatcttatttaatatattatattctttaaagacaaaatgctgtgaattagcccatattttagttttgaatatggaatggtgtgttgaaatgacatgttgtagtagactcacttaaaagcaacaaaactcaactagccaaagcaagccaaaactggggaaaaaaaaaaatccctagctcaaattagtctccatttgtttactaaaaaaagaacaatcaatacaatcaatgaagacttaattttacaagactaaatatactacaaccaacacaggaccaaaaactaagccaccttaaatataacccattatgtatttcttcataattatgaaggccaacaagtttttatctaacaaaacaatctcattttaagaaaaataggcagggtgtggtggctcacacctgtaaccccatcagtttgggaggctgaggtgggcggatcacctgaggtcaggagtttgagaccagtctggccaacatgacaaaatgctctctactaaaaatgcaaaaattagctgggcttggtggctcacgcctgtaatcccagacacttgcgaggctgaggcaggagaattgcttgaacctgggaggcagaggctgcagtgagccaaaatcatgccactgcactccagcctgggcgacagagtgagactctgtctcaaaaaaagaaaaaaaaccgtgtttatttggcagtgggattaatatcttaataatgaaagtaaaaacataatacataacttttacattcaactttatattttaccagttatcttcattttctaatgttactagacttacctgaatgctgtataattatctgaaagcatatttttagggaccctgctcttagttctacataagtgctcaccatcagaaatttctgattatcttatatgaaaactattccatgttcatttaaggatataaattacattagtggcaaaaaaaaaaaaaaaagatgaaggaacaaattcctggaacccttttttttttttaatggtcacatttatattataaaaaataaatctaagtatatttgtttcaaggtagcctcccattatcttctcaaaagacatgatgataaaggaaaattctatctagaataatattttttctttttctttaaaaataatttccattgtaatatataaagaatgtataaagaaagcaaaaagctgtgtgcaattcctgaccaatgcataacattcacccttgtaaaccaaagagtaggataataatgcagttatttctctcagccagtagatttcagcattttgccttccaatcatgtttgccttgcttctactgccacaaccggtaagtttcacaatactttacccttctgagagggcataatgctaataacctcaacaaacataaaaagaaatacagaatttaaaagtgctttgatacttgcgttaaacaagctcctgtttataaagacttggtggccatgtaatgagattgttctaattacctaattaaatagctgctactaaaggaagaggagttctttaatttagagcaaaaggtttcttgaggaaatactctttccttctacaatattttaaatctatacagaatttatgccaagaaaaagaaatggaaccagttatactacatcaagaaccagtagaagacacaataggatagaaactctgcagtctgagggtacgttatgtctcaataaagtagagtagacaaaacactgacccatcacttatgtctcttgaaggctgcttaacactatgtttctttaaataaacaacaacagagcaatatacagcttatttgccaaaattaaggataccgggtatggtcacttcatcaaaatactttctaagataaagagctaggaaagcaatatactggttttcataaagagaaaaaagtaatcaactcaatatcagagcaccatgtctatgaaatagaggggatataaaaaaaggcatgattttgtttaagtatctcagacgtaactatatttttaaaaatcttattagaaactttcttcaaagtactatatttaatgtttccctgatttttaaacatgcaaagcattataagtatatatagggaatacccaatctcttccactttaaatgcaaaacctgacaataattcaagtttgcgctgactttgtaaataaattgaaaaacctattcaatcattattattaaacatctaactacttacttttatataggacttaataacaggaaaataaactatcgaaaaatattgcttcacaagataacaccatgaggtagtcatagtatctccctgcttgggaaatgaaaatgaaaccaaaaaggccaagtagctggatgatcttgtagaataccagaaatgagttccaaatcaggatcaacatcctgaatttctgttttcagtactacctattaagattataaacaacctctgttacttcaatatgccattggggtgggggagataatgctccatattacagaaacagatagaattatgattaataataccaataatatttaggcttctcttaattattatctaaagatctccatagaagtgcagaacaagatacctcaagatttaaagacattcttcaaatctcaagatatattcctaaaaacaacataaagttggccatgatatcaaggaaaaattaagagttactttatttaagaaaaggttaaataaacacaaacggctatgggataattaatagtttggtttaaaattagcctattctttcctcccaaaaactaattattaatcaccttctttcaaaaacaggtttgagaagcaaccccatgtccaaccatcctattgttccctccctagaaagcgtggaccattagggtcttttcagaaggaaacatcaattgcaccactgcatcaattaagaaatctctttttaaaatgcatttttaaaatgcaagtaccaccttagcagaactgagggtgtcagccattcatcacttaatgcgacttactttaattggtcttctaaacacctacctaagaatacaaaagaattactgttcttattttgggaggccgaggtgggcagattgcttgagcacaggagttcgagaccagcctgggcaacacggtgaaacctcgtctctactaaaatacaaaaaaaatagccgggcgtggtggcgggcgtctgtaataccagttactcgggaggctgaggcagagaattgcttgaacctaggaggtggaggttgcagtcagccaagatggtgccactgcactccagcctggacaacagagtgagactgtctcaaaaaaaaaaaaaaaaaattactgttcttactgggagctttgaggaagaaagataaaaatgcaattctgaactatgttcaggcctaggtaaagactctggacatcaggaggacagcaaaagaatccatggtgtccaaaaggataaaaagaaagagggtgcaggactagatgctggagttcagtccaagacagctttaacacactatagttttgatttagtactactgattaacagcaagtcaaagcaaatatttacagtgaaacatcaagcatgcagttaaaggttataattgtgaagctaaataccacaaaagttgaaacagtctgactatgtacacagtgttatacaaaactagtagtttgaactcatgcaactgtgggtccaactgtacgtattactatttaatgtccttttacatccaaagatagagacagaatattgtcaaagatttttatggttggcctgcgtctattaatataaagaaacaaccagaagctctctaacactgaaaaaataacactaaagacaaaaccttggggaaagctggattcttcctgatttaaaattattcaattacaaaactagtttttctcataagaaaaaataatcattgtttactattattcaaggctttgttgaatttattttgttgaatttagggcaaaatgacatgtttatattttaaataaatgaaatctagtcattaaagagtcttaataaagcatctgatgatcattttagataggtaaggtgatctccatgtaagggagggccaacatctaccttagaagctaaatgtgtcacatcagttttactatagtcattaggctttggagtatcattttaacccagatagccagagttatatattaaaatataacagggttgtcaacgtacatttgttgagaaaagaatgtttctatacagaaatggtgactgattgtaaaatgccagtaatgtattttaaaaagaccataagttatttaccttagcctatgtagaatccatataccaaactttctgccaataatattttttcttggccagtttaaaaagctctacagtttatgtcccacaaactttaagtcagaaaacagaagctgaagaaaaatcatcactttaaatatttccttagactgatgtttacttaatatgggcatctctactatccagtaatgtgggcacttaaattcatggttcaagaaaggatacagttatactacaggttactaatgaaaatccaagcatgaaaatctaaatgcccaaggcataactggcttataataccacatattaagtattcacagttattttctatatatacattgaagtgtatgtttctagggaatctttaagcaaatggcacatggctgaataaaatcagaaaagcttttaaagattctatacttaatataatcaactatgaaaattatcttacagttaaaatatccctaagggaatatagtaattttaaaattattatccacagtagactaataacaggagaataaattatgtaaatagataagttcttctcataaagcttatcaatatggtgctctatggatttatacaattttatacagggaacactgtgttgcatagtttacacagtcattatatttttctgatctttctgaatcctgaggcagatttagcgttgtatgaagatacaattatttttcacactgaaaccacagaggaatactgaagtttctagatggcattatttttaattgcactactttaaggtggtaggacacaccctagatacaagttaaataaaataagtatttgagttctttgtactttgaactcttcacaggaaaagtgttctacaaattcaagttgttacttggggggcaaggaaaacatataattctcaagcaaaaaaaaatcttaaatcctagtttttaagatagctcctaatatccaagacaggatataggacatgagatactggcatttgactattcaaatttatataggattacagtactttggcaagtacaaagaaatacttttaaaaatacaggtatataaattaatgaaactggtatttaaaagatttaatacaggaaaaaagtattgtatagtggtaccaattctcaatacaaattattaagcatagtttatataattccaaaagttattaacattattgctcgataccacagttgtatggaacaagttcttgacacacattaaaacttgtataatttctggtttataaaaacaaaaatttacacataggtcattcacaaatctaaaagtttaaaaatgcatagagatatgcacaacaaaaaggagaaaaaattatatgtatttgtgtatatgtatatttaaaagaaacaagctaatctgatttaacatgtatgtcacactctcaatcaaaacaagtatacataactgtactgaaagtgaactagtggataaaaatagtactaaatgcatcctccatttcttattaacaatcttttctaaatatcaacgggatattaaataccagcttacttttagttctagaacttttgctttctttcaaaaacttttcagaaacatatatccattctataattgtgatagattggaagaaatattttccttagaaattttgtaaaggaatacttccactcttttgtatgtaagatttgataaacgataaaaacccaagtaaggccattattatcatcttgatcaaaaatatacacagatcgtgatgctactatattgtgtgatcctgagttctagtaaccactagatacatgcataccattcactgatttgtctattctaataaaaatttaatcctgtcttactacctttgaagacagaaatacttttaaaactttttgataggtcttcataacattacagattatctgccataaacagagcattaggaattgtatgagaaagggtatgttaggtcccaaaagactattaaagaaaacttactattttaaaataatgacaatatcaaatttgaaaagaaagaaaaaatgacagaaaaagtgtgcttgctggaataggtaagttgagccttacaaaggtgtttttctctgttaaggaatttataaataaaggactgtgtgtaccttggtgacaaaataaaaaaggctggccactttttatgctaagttcaaatgtatttttttgataatacaaaaaagtaatccttgaaaatcagaatacataacagaaaagagcacaataacttaagtattaaacatctgtatgaaataactgttgcaaagattgacaaaaatgcacacttagaacatgcggttatttaaaaaaaaaacaaaaacaaaaacaaaaaaaacaccacacgattctgtagaaccaatgttatgtcaccaccaggagagcaccaagcaaggcaccattggaaagacaacatacttggaaagtctctataaataaagtaaatgctaatctggtcgaaaaatcggtgtctttggtaaaaattctatgaggatgacctgtaaaaggagaagaaaaaggttttaaaagatttaaacaaaattttttcttaaaacttcaattatatgctttcacaatttttttgaaaatccattcacattttaaaacgcaactttgcattactaaaacagatctttatctgataatgcagagttccatcactgagaatttttctttttatttctggacctttaccaaatacacgaaataccttggctctatgaaaaggaagacaaataagcaagtaaaatcaccaaagtctgagaagggtgatatagatagtgcccctgatacactggaggagcaaacatgcatacatgcacgctcccctgcactcatgagaaaagaggctagtatttacttagaactaactgtataccaggtgttccatactacattgggtctctttaaacccaacaacttttctatgaggcaagtattataatccttatttcacagatgaggaaactgatgatccagagaagttgtatcacaattgaatgtggagtcactgtttgaataaaagactgtcttaactccaaagccttgccctttataccaccctacgtgactgcagctcacccaacatttttctttagactttctcctttttaatcaacccaactacatgagtcttctctaagttctagagttgctctcattttactctaccagaatatgtaatctttagataaaaggtcctttatctcttaattttttaaaaagtccatttcttcttaggttagcaaaattaaaggctaaaatttgttccaaaaggccttttaataggaaactaaaggaaaaccaacaaaaacaaaatatggtaacacagaattacacaaagtgaccagagctaatttttccaaatttgaattttcttaaattacagtcaactctttcttttgctccaaatttgtattaaatagatggtgatttaaaaattatttgattttaaaagtttctaagtctagtgaactcatcattctttttcagaaactgtgtcttgcttgatatgacctccagatttcaatacttctacaaattagctgtctgggccaggaatcttcattttcactcttcagttctcctggcttttgatctgcctcaataaagaagatacacttctatacctggctcaaaaatattcctgtcctactctaggtatcctgcactaaggcttagctgtcacatttgccactctcctgacctgtgatttgcctacaaaatattcactagctccctgttaaaatactttctcccaactagcttcttcatttgagctagattttcctgtttctcaggtttcttatctataaaataaaagcattgaactagataacaagattctttgcagctttaaaatttgacaattaaatgtttaaactacttaggagtcaacattaaataaataattttgtatttcaagtatgtcctcaatcagtctttataattttagtccccaggtatgggcatccccacactttataatatacacttttaatacataacataaaataaaggctatctttgcctacatttgaactattagtttttaaataatatattctacaaatttttccttcagaagccacacatagagactggccacttgtctcatttattctaaatcatccatctctaccatatctgaacaaagaaaagttagtgccaaggtggaatatatatatatatattttttagtatctccaatgttcaaattataatcaaggataattattttcttttaacaaaattaaattcctgtaagttaaagaaaagttgaagaaaagagggacacatggttaaaaaggcccaaattcattagataaaatgaattttatttgctagtttaacttttaaaattcatttttataaattttttaagctacattattctcactttcaactatcacaaatatatatatatactctaagaaaatccagcagaacacattttttctccccagcttattattattttttttaaagagaggtgggtattgctatgttacccaaactgtctttgtactcctagacgcaagtgatcctgctgcctcagcctccccagctagactactggcatgcccactacacccagctttttcctggcaattgaaatatttattttatctttactactcttctgggtatcttctatgatggagtgaaaataatataatggctttagcagaagtgcttaattatctaaaaattcaaggaaacttatttgacaaacaaagcatatagttcagaatgttttggaaggttataaattattttatgaataaattatagtcatatagttctatctggaattcatagcattgggataacttttatgttttcctttccaaagtaaatttagaaatgcatgaaaaaattaatacctcagttttaagcttagtgtttgtgttataaatgtagtaaatatttttttcactaaattctttacatctcctatccatccctctccccaaaatatatacataaaccctctatctaagatgaaaatacaagagtagtctcctcacctcaaaatgagttactcaaatgtgttatgattataaagaagtatcaagtgtctttctcatcatcatacattaacatgtttgatgtagtaaagataaaatctacattatttggttcattgaataaagctagtctaagacattttaaaaatattttttatgttcaaggctagaaataggatttgactgtgggataatgaaagaacaggaaaatgctaacagacaaaaatgattttatgataatttacaactaaacactgttttaatcaatattttacacatacacacgcacacatctatgatggctatattgttttaaagaatagacaaaattcctcagaaatgttgtaacaggtacttcacaaaggctctgagttttattttcaactattaacttttccttagatcttttcttttaaagtaataacctggccatatttaaaataaaatatccaagctcaaaagagaattaaaattcttaattttctagagtattctgaaattttcaaaaggagaaaaactgttcaagtaaatcatggagtcagtaaattaaatcccatgctgagtaagttctaaaattcattgtatatatatgccaaattagatattttttaacaagtaaacacaagatgatcaacatctcatctcctgcttacttttaatttttacaaagcagtattctaataacactttaaaagagattctttaaagggcactgaggtacgggcagttaaaatctataaagggtaaaggtttcttaagctccaatggcttggctgaaaggttttcttccatacttggaaacttgattagcattatataaaaaagccatatctgacttgctgcgtaaccaaagttgtggttattctttatacagcatctaaaatttcacactccatcaacacatgttcaggctattttatcttggcaattaatttattatttttcagaacacagtgaagccttgttttcaagtcattcataactttataaatcagtcttgcacatgaaaccatgcatctgtgaaccgtagaaaatccttgcactcaggagattaagctcctgacacctttgctgattaataatcatggaaagaataagatcagaagcaaaataaatgatcatttaatagagaaactcacaaaacagccctttaacttacatattccatcatgttattcgtttcacatttccttttgctcagtctccaatgcaagcacagctagacaagtaggaaagtaaaagaagaaaaatgagctctattttattgcagcacacagactaacccatttgtccacctttcatatttttagttcaacaaaagcatctgtttccatactgtgcaattcagaccccaacagtacgaagctgctccctgtggtactcaccttgtggtataacctattgttttcccattctaataacttctcaatcgatcttcgtgtctggaagacaaatgagaaaaaagtttactcttgactggttttagaaaactttgttttgcagctgctttttctgtgaaaaggggagaggtataagacagtgactgagtatagtgtggtgtgcatcactatcgatgttctaagcactaaatggtaacctgaacacaaaagagtactctttcttaaaaaagatatgcctttatttttatcatacgaatctttttttactagcctctgatttaaaactatcaaggtttaaaaagctaatgtcatctgccaaataaaattaaattcccacttctttcaaaaatgtttccaatacttaaatagtaacggaagttccttaatacatattttaaaacaaaagtaaatattagttaacaaaatgcaaatggcctttcagtaagttccaaaacaaaaaattggaatattaaaaaaatcaatgagttataaaatcaaattaattttcacatcatgcttaaaataatgcccatatttaaaagccagcttactgattattctaccaatagattttttgaacagagccaaaattttatttaaaccaacataaaagtgtcatctgatagtaaaatcaaactcttaattcaatactactgtttcaggaatcaactgagaatttacttcagttgatttttgcaagatatgctatgctgcatgaaatgtttcttgcttgagaatatgaataaaagagggtaattcatggtgccaggtgttaggatgagactgacacagctgcaggtgcaaaaatgacagtgttgccaccaggatcaacttgcaacttggttcagctgcacttttcttgcaagagaaagaaaaaaacatcttaccactattaatgtggtataaagaagtactagtaatcaaatatgaaaatttgcgtgtcaagcaaggattagctaggtgaaaaactgttaggatcaagctgggtttgaacagtttaatgttacataataaaattttaatatgtatttaaagtatctactttaaatagttacattaccttttagcatattaaacatgctaaagacacaccaaagtcacatagatgccaattataattcataactaccaatgaattacgactactgccttacattttccaagcttatgtcataaaaatcggaaaatcaactacttccctgggtaataatatgccaatgactaatttattacattactttttctgaagagtctttttggcaagaattttaaagaaaaaaaagtgcccttgttaacaatgatcagcagacctcacttgtttctttgtaaagatagccttttagaggcagctctccttttaaatgaaaatagggcagcagttatggtcacactttttgttaatttagttgccagtcagccccaaatcaaaagaaaataaggctgcagagtgtaattaacattcagttcggtcgttttgtcccttgtctagcccccaagctttgttaaaattgccatctgaatgctgaaggctgtagggaaatcgatttgattctaatcgcaccatgaaaagaacatgatctaactgctttcagccctccgtaaatctgtactaggtctttagcacaatgcaacttccaatttaaaaagcactgaatgtctcgtcaatgactttgtgaagaaaaaagaacaaggagcagacataaaaattccaatagttgtttaagcattaaagttcatttgcatcacagcgaacctgaaaagggctgacctctcaaaccgcctctcaggtctatgaagttgtagccttgacaagctcacattgacagagctcattgactctgaaaggctactctatcaatggtgaaaaatggcaataggttctactctgagcaggcatctgcctgcccacccgctgctaaaccaatggcaaaaccgattcaaaacctgaatctaccttgtaatctttctttctagggccttttaataatagattaagattactatacaatttgaggttttacttttactgatgattttgggggtgggtggatgatgaaagaactagagcagaacaagttttccaagcccactgttttatattaatgtataaaatagtacccaaaagcttaatactacattctgcaaatacttattacttaaagaaaaaaatgtagttaccaccatcatttcatcagaagtttaaacccatgctataataagaatagatctcattatgatatatagacacatacatacacacaattttaaaacttaaaaatatttactttaacttaaatcaactactagtatttgaataaaagataattacaaagtataaatcttgaattccaaaatatttaagtaggaattctgaatttcttctctgtttataattaggagtttaatgatagggcttggtataataattgtatcttacaatatttaagaattataaaacaaacaagccctgatatgccacattctgaataagcatataaatataaaatatttctacacacttcacagtctgaagtaaaagctgtgaattagcaccatctaattttgctataagacttctttcctgcttgacaggtgaaaaaaaaagcacttgcacgtgcagcttaattaatcattgcacttgacatctcaatgatttacagtgaggagcaggtgagaacatacaaaaccagaaaggaacccttgatttgagtggaacatttctagcacactaaggtgacaagtatatagattctagcagtcatttaaaaaaaaaaggaaagaaactgtgccacaaattatttgttagtaacaacaaaagctcaaattaaatagaaaaaaaaaaggttgagctactgagaatgtttaatactatgcaattattgttagttaagaaaatcaaaatatattttcaagattaaatacaataccaatttggcagatactaaaaaaaatgacacttcagcatttataaaagctacttaaaagcttttaaaagaaagcactttataattgtagtcatctagataaaagttaaagagtttatgtccacaaggctgtcaggtagctatttctaatgaaatgtaagattcaacagtgtcgaactctacacttgctaactgtggacaagcaaatctaatcatataacaacctgtccttggtttttaaatgtttatttcaactccaaattcaaaacaagctgaagcaaattaacatgcatcagaaaaaaatatgtatgggatctgtcaacatgaaacaaagtaccaaaaaacaccatctttcagtattccaggccagtttctaaaaaaataagtcatctttaattttctttaagagaatttagtgcttgtgaaaagcaccagattgatagtcatgggaactaaaaatctatttagctgaaagaacaggggaaggggcagtgcaggctttagtgtaagcttccctacagtgggccttaatccttttcactgctcacaccctgggggtgaggggacaggttagcggttctttaccaatgtaattctccgtctttctgcaaaagatgatcaacaagaaatgtaattttatcaagtattcttatctttaattaaaaggaccaagaccaccaactcacaatatgcaggaaaaacaacttttttgtgtgaatggcgtcatgttactaacctggtctggaagtagacagctccaagcatctggatcccacccatctccctcagctcactttaaataaccctttttctttaaaaaaacaaaaacaaaaacaaaaacaaaacacacatttcttcatttccacaccttagtggttatatttttctcattggtgaactagttttaatacagccattcagctttgtgaaagtaaaaattaacaggagatttaaaaaatatcatttcaattactgaataggtattaaacagacttaagttgagcaacaagtagtagtaacataagaatagaaattttggcttctatttatattgcctttggtcccttttagatttttggtagaattgtgaaaataggaaaaacatgaaaacggaaagagaactaaaagggcctcagtaattcataaaatggctaatatggtaatgattaatcagcaatattagataagacatacccaaataagacataccttccaaagaagcatctaaagtaagcttataacagcaaagcacacatacacctagacaaactcaattactgcaatagaaaactaagatttcctgaaaattcaaatttgaattattatgtatttttgtaatttttcctaaatactgtaactttcttaggaataaattattaatattattccctataaacaaattaaatgccattagatataaattagtcttccaggacagcaaagagccatttagaaaatctttaaggtattaatctcctactttgccaccactggttacttaagagtttcctaattcccaatgactcatttaatcacaatcaattgtttgaaaacatggttttacaaagaagtggttttctagacattactaataaaaccaatggaaatctcataaattttagagtattgagagctaaagaaaaaaaatgttaagtgtagaaactgtaacaaagtttatcttaatatttcccaataaaatagtattatcagtctttagaacaaaaatatgctatgatatgctaataaaatgtacagaatactcactaataactatttataaaagttcacctatttaaacctataattaaaatgtatttgaattggatttattcataccatcacaaaatgggaaagcaaaatttcaaatgttcaattccctacttaaattttaaactcttaaatctataatgcattaattaacctttaactaaaatgttttgaatatattcataatcttgtttttaacttatatttttcaaataagaatgctattcatctttagacatctgtgtaaattgaatttgttaagtaaaacaatgtctttagctgtaagttattagggagaaaccatatataatttaaaatgaattattttaacataagagaacttaagaggaaattatattattcacttctgctcattctggattaatatgaaattttatattccagtgatgtgcagaaaattaaataattatatcacagtattatgctacgtgaaaagcctagattcaccaaaaaacaaaaaaaaactagaatatgatttctcaaaaggatttttaaacaaattcctttcctgtacattaaagcaccttttaaaattttaatatgaacattaacttttaaataatctagatatattaaaacacccactgaagtatcatgtgctatttgttaaaagtaatatttttagatagaaatacgctaaaaaaaattgctaaaattttgtgaatcaaaaatatcctctagtactgagcagtgtcttaataggtgctaatcttaaacagaatttcatcaagtttacgatctaggctagtgagagaatattaacttgtttaggttatactggttatgaattatgaaagatagggattctctctctgcagaaaaaaagaaacatgtacacaaacatgcacaatttaaagggggttatctactaactctgagtaccatttcagaaaatactaacattttaaaaaactaaaattaagttttgaggtccccatctgacccatcttctgcctgacctatttccactaagcaatcatcccactcggtctcaaagggttcttttggtttcaataatctagtcaaataaaaatgcgcttgggttggggcagggtgcaggaagggtctccttgaatttgggcagcaaatatgtcactattattgttaaaaaaaaattatccaaaaaattaagagataaaaattaataaatatagtttcaactgaccacagaatattagaaaaactgttcataagacaaaggaatttcactatgcaaataaaataaaaagtacggctatcaggaatttttaaaaatatatgtaattacaaaagaaagaatcagtgcttactgtcaggcctctgagcccaagctaagccatcatatcccctgtgacctgcacgtatacatccagatggcctgaagcaactgaagatccacaaaagaagtgaaaataaccttaactgatgatactccaccactgtgatttgtttctgccccaccttaactgatcaacgtgctttgtaatcgcccccacccttaagaaggttctttgtatttctccccacccttgagaatgtactttgttagatccaccccctgccacaaaacaccactcctaactccaccgcctatcccaaaacctgtaagaactaatgataatcccaccaccttttgctgactctctttttggactcagcccgcctgcacccaggtgaaataaacagccttcttgctcacacaaagtttgtttggtggtctcttcacactgacgcgtgagacatttggtgctgaagacccgggtcagagggactccttcggaagaccagtcccctgtcctcgcctcactccatgaggagatccacctacaacctcgggtcctcagaccaaccagcccaaggaacatctcaccaatttcaaatcgggtaagcggtcttttcactctcttctccagcctctctcgctacccttcaatctccctgcccttccaattccagttctttttcctctctagtagagacaaaggagacacattttatccatggacccaaaactctggcgccagtcacagactcgggaagacagccttcccttggtgtttaatcattgcagagacgcctgcctgattattcacccacaattcactggtgtctgatcactgcagggacgcctgccttggtcattcacccacattcccatggtggcaagtcaattgcggggatgcctgctttggctcctcacccacactgcagcccagggctgctccccaccaccccgcttctccgtgtctctacctttctctttaaacttaccttcttcactatgggcaaccttccaccctccattcccccttcttctcccttagcctgtgttctcaagaacttaaaaccccttcaactcacacctgacctaaaacctaaatgccttattttcttctgcaataccgcttgaccccaatacaaactcgataatggttctaaatagccagaaaatccattttacaagatctagataatttttgtcgaaaaatgggcaaatggtctgaggtgcctgacatccaggcattcttttacacattggtccctccctagtctctgctcccaatgcgactcatcccaaatctttcttctttctctcctgtctgttccttcagtctccacaccaagctctgagtcctttgaatcctccttttctacagacccatatgacctctcctccccaggctgctcctcaacaggctgagccaggtcccaattcttcctcagcctctgctccccgaccctataatctttttatcaactcccctcacacccattctggcttacagtttcattccgcgactagccctcccccacctgcccaacaatttcctcttaaaaaggtgactggagctgaaggcatagtcaaggttaatgttcctttttctttatccgacctctcccaaatcagttagcgtttaggctctttttcatcaaatataaaaacgcagcccagtccatggcccgtttggcaacaaccctttgacgttttactgccctagacccacaggggccagaaggctgtcttattctcaatatacattttattaaccagcccactcccaacattaaaaaaagctccagaaattagattctggccctcaaaccccacaagaggacttaattaacctcgccttcaaggtgtacaataatagagtagaggcagccaagtagcaatgtatttctaagttccagttccttgcctccactgtgagacaaaccccagctacattgccagcacacaagaactccaaacacctgaagtgcagctgccaggggttcctccagaacctcttccccaggagcttgcttcaagtgccagaaatctggccactgagccaaggaatgccctgcagcccgggattcctccttagccgtgtcccatttgtacaggaccctactggatatcagactgtccaactcgcccggcagccactcccagagcccctggaactctggcccaaggctctctgactgacttcttcccagatcttctcagcttagtggctgaagaccgacgctgcccgatcgcctcagaagcttcctggaccatcacagacgctctgggtaactcttacagtggagggtaagtccgtctccttctaaattaatatggaggctacccactccacattaccttattttcaacgacctgtttcccttgcccccataactgttgtgggtattgatggccaggcttctaaacctcttaaaactccccaactctgatgccagcttggacaacattcttttatgcactcctttttagttatccccacctgcccagctcccttattagatcaagacattttaactaaattatctgcttccctgactattcctaagctacagccacacctcattgccacccttcttcccaacccaaagcctccttcacatcttcctcttgtatccctccaccttaacgcacaggtacgggacacctctactccctccctagcaaccgatcacatgccccttaccatcccattaaaacctaatcacccttaccccgctcaatgccaatatcccatcccacagcacgatttaaaaggattaaagcctgttatcacttgcctgttacagcatggccttttaaagcctataaactctccttacaattcccccattttaccttgtcaaaaacctgacaagtcttataggttagttcaggatctgtgccttagcaaccaaattgtcttgcctagccaccctgtggtgccaaacccatatactctatcctcaatacctccctccacaacccattattctgtcctagcaaacctagctgaccccatagatcctaattcctttcgccactcctctttccattccttaaaaacagccctagaagctgccaccacgctagctctccctaactcatcccaacccttttcattacacacagccaaagtactgggctctgcggtcaaaattcttacacaagagccggaaccgtgccctgtagcctttctgtccaaacaacttgaccttactattttaggctggccatcatgtctccgtgcagaggctgccgccgctctaatacttttagaggccctaaaaatcacaaactatgctcaactcactctctacagttctcataacttccaaaatctattttcttcctcccacctgatgcatatactttctgctccccggctccttcagctatactcactctttgggtctcccacaattaccactgtttctggcctggacttcaatctggcctcccacattattctggataccacacctgacccccatgactgtatctctctgatccacttgacattcactccatttccccatatttccttctttcctcttccccatcctgatcacactcagtttattgatggcagttccaccaggcctaatcgccactcaccaacaaaggcaggctatgctatagtatcttccacatctatcattgaggctaccgctctgcccctctccactacctctcagcaaggcgaactcatgccttaacctgagccctcactcttgcaaaaggactacgcatcaatatctatactgactcgaaatatgccttccatatcctgcaccaccgtgctgttatatgggctgaaagaggtttcctcaccgtgcaagggtcctccatcattaattcctctttaataaaaactcttctcaaggccgctttacttccaaaggaagctggagtcattcactgcaagcaagggccatcaaaaggtgtcagatctcatcgttcagggcaacgcttatgctgataaggtagctaaacaagcagctagcgttccaacttctgcccctcatggccagtttttctccttctcgtcagtcactcccacctactctgccactaaaacttccacctatcaatgtcttcctacacaaggcaaatggttcttggaccaaggaaaatatctccttccagcctcacaggcccattctattctgtcgtcatttcataacctcttccatgtaggttacaagccgctagcccatctcttaaaacctctcatttcctttccatcgtgaaaatctatccccaatccaccactcttgcctccctcttggagtggatagatgatctttgctgacagaacacactccaatactttcaccctgatgaagtcttattctttacttttatactcattcttattcttgttcccgttcttatgccacccactacctctccccagctatctctatcacactatcaatcgcactcactctctcctagccatttctaatccttctttaacaaacaattgctggctttgcatttcttttttctccaaaatcaccgaggccctgacttactcactgctaaaaaaaggggactccgtatatttttaaataaagagtgttgtttttctgtaaatcaatctggcctggtatatgacaacataataaaactcaaggatagagcccaaaaattcgccaaccaagcaagtaattatgctgaacccccttaggcactctctaattggatgtcctgggtcctcccaactctcagtcctttaatacctgtttttctccttcttttattcagaccttctaacttctgtttagtttctcaattcatacaaaactgtatccaggccatcaccaatcattctatatgacaaatgtttcttctaacaaccccacaatatcaccccttaccacaaaatcttccttcaacttaacctctcccactctaggttcccacgccgcccctaatcccgttcaaagcagccctgagaaacatcgtccattatgtctccataccacccgcccccccaaaatttttgctgccccaacacttcaacactattttatgttatttttcttattaatataagaagacaggaatgtcaggcctctgagcccaagctaagacatcatatcccctgtgacctgcacatatacatccagatggcctgaagcaactgaagatccacaaaagaagtgaaaatagccttaactgatgacattccaccactgtgatgtttctgccccaccttaactgatcaatgtactttgtaatctcccccacccttaagaaggttctttgtaattctccccacccttgagaatgtactttgtgagatccacccccgcccacaaaacattgctcctaactccactgcctatcccaaaatctgtaagaactaatgataatctcaccaccctttgctgactctcttttcagactcagcccgcctgcacccaggtgaaataaacagccttgtcgctcacacaaagcctgtttggtggtctcttcgcacggatgcatgagacacttaggaccaacaggtagaaaaggggtaaaggccgggcgcaatagctcacgcctgtgatcccagcactttgggataccgagaagggcggatcacttgagcctagaagttcgagaccagcctgagcaacatggtgaaaacccatgtctacaaaaattacaaaaatcagccaggtgtgatggtgctgcacacatgtggtcccagctacttgggaagctgaggtgggaggatcactcgagcctgggaggtcaaggctgcagtgaacgtgtcactgcactccaccctgggcaacagagtaagaccctgtctcaaaaaaaaaaaaaaaataggaattgttttaaaaaacaagaagaaaggggtaaaagaaaatcacctgctgatggatgataacacaactggagaaacaagaagagataaggaaccagcatttgtggatcctcactttgggtctgatcccatgttgtgtcttgcttttattaccttacttaatctgcacaacaagcctatatggcggcttggactactttctttttacatatgaaaactaaagcttacagaggtgaagaaatgtaaatctatactaggaaatgatggagctcggatctgaaaccaggattaaatggccttcaatttcctgttcttttcatcatgctatagaactattataatactatcacaaaaaaacaatttttttgtttttttttgtttggctcacacctgtaatcacaacactgggaggtggaggtggatggatcacttgaggtcaggaatttgagaccagcctggccaacatggtgaaaccccaactctactaaaaatacaaaaattagccaggcatggtggtgtgcacctgtagccccagctacttgggagactgaggtaggaaaactgcttgaacccgggaggtggaggttgcagtgagccaagagtgtgccactgcactccagcctgggtgacagaatgagactctgtctcaaaaaaaaagaatttttgtcaagaacttttcttttttacagatatgttatggatattttacagatattattctgagatgaataaaggaatggccctagtatccatctactaaacaaagctggaaaacagagataataaatctttatacacctcctcctctgcccttcaccttttttatttcctagtatgccaaactctgacagtttttgtcttttaagtttcattttaatctgtttacttctctttcttgtctacttttatgcctttctcttcttgactaatgcagtcacttcactaaatccacccttcttcctttcactttaaaatcttaatggtttcatttcaattatattttacatacatttgttgttaatttcaaggccattcatgattttataatgaaaaatttttgtaaatcgaacttttttacagatattatcctgagacaaataacatatgtatgacatgcaagttttcttagccactaacaaggctatcggccttgaataatcaacttactctaaaactatgattaatgtgttcaagaaaagaaagtagaaagctggatgaaaaaacgaagaatttcaaaagaaaactggaatctattttaaaaaacagcaaatggacaccctagaattgaaaaatacagtatctcatattaaaaactcaggtcacagaagataggtgcaaatccttctataaaccaccacaccaatactatgttctaaatatttacagagaaatgaatgtcagccagctgttgacaaaacacattttctaagcattctagcatatctttacagtgctacctctgcatttttaaggctcaaagtttacatttttatgagtatcctcttttatgatgaaaacttagtaatgcggtttaattttaattaaaaacaaattgtcactagtgttcataataatggcagtaatttacataagaatctgtttaagtttcaaggccaaagcattctttaaaatggaactgcagtaaatgtattcatctagttatgagaaatcttttatgcaggaccccttttgtaaagggactgaaataagatttcaaaaaggtcaaacctatttcattattctgtatcttataatggggaagatagtgaagaaggggcaagaaaccacaaattaaatgcctagggctagataaagaaaacccagttctttcattcagagttcctgtcccatctttactgcatgggacatgcactcattacatgtcattctcaatctctctaaaagtaaatacacaagtttcaagaaaggatctaatactagaagaaaaataactttaccagaagtcatgtaaacttatttgctagggagtaggaacctaataaataacttttcaaagacaggatgttgattttcatttgtttttataaaagcaaaacagaagcaaaggcaatatatcaactcttggttgtccaactataactttgtataaaatctgcttaaaatgtatatttttctcctatacccactttacctgctttacagtttctttcctttactgtttgtgtcttcaagaaatacaaacttatttaaatattaagaaaaaatacttacaaagaaaaatctgctaaacaactaaagtactgcaaaagttaatataataatgcttggatattgttaccatttatcaatcaactggacaaattaggtaaattataacccataggcctgaatttcctaactcatgaaatcttttaaattccttccaaagctctaaaacctctctctctgctggtaggtataaagtcaaattttaataataaaaaatagcttgatttttgtagctctttaaaatagcaggaaaagcatgaaattttgagctgtaagattggaattctagtttggcttaactttataaactgggagatctcaaataggttacttgacttctgagcctcagttttctcatccttaaaataatctgaatatctgatttgtaattttgtaagaatacagtacatgtaaattgattaactccatcactggtaaagagtgagtaaggactcaactttctgatgttaccatgatattttccacatagggtgttatgaagattaaattaaaagagaatgtatgtaatgtgccttgctaatagccggtatacaataattatctttctcttcatttgttccttgtagtctattatttcattgcatatcaacacatattttccattttatagcaaaatctttcaagttaaacatcaggaatttagccatttggaataactggtattataaactaagtgtttctatcttaaattacatttaagtaggtgcaaaagtcaaacatcgactgggcgcagcggctcacgcctgtaatcccagcactttggggggccgaggtgggcagatcatgaggtcagaagattaagaccatcctggccaacatggtgaaaccccgtctctactaaaatacaaaaaattagccaggcgtggtggtgtgcacctatagccccagctactctggaggctgaggcaggacaatcactcgaactggggaggtggagattgcagtgagccaacatcgcgccaccgcactccagcctgctgacagagcgagactccatctcaaagaaaaaaaaaaaaaaacaaaagtcaaatatcaaatatgatgtgaaaggttttattaagtgtaaaagaaagatgtttctgatttaaatacaaaccataactcaagtttgtttctctaaatttactggacagaaatttctctatgttctattttatattgctaagtctatcactgtacattagaacagtataaacatcctctgcacaagaaagatcaggttcctgaaaaacctctggaataaaatcatatgaaagacaagaaatatagggtaatgaagattaagaccattattgaccacatgaatatttgttatatttaccaaaataaggcaaattgaatagcattctaaaaaaatagcattgattttccacatcttcaatcaataacaacagcagttataagactacatttcattcatcattccttgttcactagaaattactttggattctcacttcactagaatttcaatataatttcaaatttgttctgccttgttgcaatatctgtattatgttgttagaggtatttttctttatctgattcttcatctaaatgtttctttctcattttatgactcagagttactgactataaatggtcaatcccaaacacagagtaaatcagttctgaaagttttggataatttttaatacatcggtataactgaataaggatattttatattcctcccatataccaatattcttagctttctgcttatgattcccccaggttcactttcctttgaatttctttaagtcttacaaagttgcattctaacttaaaaacaaaactttactattcacttctcccatttagattctcaacactactatacccctaaccagagtaagtcacaattattggataactaaacttgaacttgagagcaaagatattcagaagaaacataagtaaactagaatctcaactaaaaaaaaatacagtgaactggattaccatttatttgtatgcatacaaaatactttacatgagagaaatacaggcatcttagcaaaggtttcaaaaactaaatagcaattatctttaaaaaaattcagaaaagaaaaaacctaagaaacctatattaaaatatttattacaatgatggccaggtgcggtggctcatgcctgtaatcccagcactttgggaggccgaggctggaggattgcttgaacccaggagttaaagaccagctggggtaacccagagagacctcatttctacaaaaatgttttgttttaaattggccaggcatggtggtgtgtgcctacagtcccgcctacttgggagggtgaggtgggagaatcacttgagcccaggaggtccaggctgcagtgagccatgatcatgccactgcactccactctgggcaagagagtccctatctcaaaagaaaaaaaaaaaaaaatatatatatatatgtatacacacacacacacacacatatacaatatataaatgtataaatctatatttataaaatatataaatatatatacacacatatatatatgtttatatttactaaaatgctaattttttttttttttttttgagatgaggttttgctcttgttgcccaggctggagtgcaatggcacgatctcggctcactgtaacctctgcctaccaggttcaagtgattctcctgcctcagcctcccaaagtgctgggattacaggaatgagccaccgcacctggcctaaaatgctaattcttaggctttaaaataaaaattaacattgagaatttttttttttttttgagacggagtctcactgtcgtctaggctggagtgcagtggcgcaatcttggctcactgcaacctttgcctccgcctcccaggttaaagcaattctcctgcctcagcctcttgtgtagctgggattacaggtgcatgccaccactcctggattctttttaaagcatggaaatagaaatagtttatagacctacaaagctcaattttcagacgattacacatttttggaactggaaaatatgtgaaaaatcagctggcctgtcctttgctcagattaaaaggaaaggaaaaaaaaaaaacctaacgctgagagaggttttaagcaactctctcaaggtcacccagcttcaaacattggtttactatcctttatactgtatcacactgctcctacagcagtaggagctcctattacttattctaaaaggcaagatgcttctatttatcagggaatcttcttcttattagtaagcaccatatcttatgcaacattatgatcttactaatgccaggattttaaaggccagatgaatacatttattcaacaaatatttattgaacaccaagtagatgctaggcactgtgacagcactgaggatacagtagttaagaagacaaacactgagaataataatactaaaatgataataacagtaactacattgaactaagcacctactatgggcaaaatactatattaagtagcctagatgtacttgctttttttttttttttttttttttgtgagacagagtctcactatgtagccttaggctggagtacagtggtgccatctcggctcactgcaacctccacctcctgggttcaagcgattctgctgtctcagccttctgagtagctgggattacaggcacgtgtcaccacgcccagctaatttttgtatttttagtagagacggggtttcaccatgttggccaggctggtcttgaacgcctggtctcaagcaatccacttgcctcggcctctcaaagtgctgggattacaggagtgagccacagtgcccagcccacttgctctaattcttaaaacaacactacaaagaagggtttagagtgagtggtttgataagtgtcacagtccaatccagctagttctagcaccaaaatgcaagttctagccaccacatgttacaggccacttccctattcctaaatgaatgatttcctgatacaattttaaatataaataaaagcacaaaggaaatgaaaatatgcaatatttttaataaatccatatagggaccacttttagaaagtggcataattctggttagcatatctaaaagagtaaagcatttttataaaggagataagacaactaacaaggttaagaagttggtgtatcctctccctccccctccccctccccctccctctccctctacggtctccctctgatgccgagccgaagctggactgtactgctgccatctcggctcactgcaacctccctgcctgattctcctgcctcagcctgccgagtgcctgcgattgcaggtgcgcgccgccacgcctgactggttttcgtatttttttggtggagacggggtttcgctgtgttggccgggccggtctccagctcctaaccgcgagtgatccgccagcctcggcctcccgaggtgccgggattgcagacggagtcttgttcaaagtaaatttcagagaaaaatacaggtcaattttataatgataaagaggtcaatcacaaaaatcctgaaaatttatatacctaattacagagtgccaaaatacatacagcataagctgcatgaataaatacacaaacccaaaattatagtcaatccatagaaatgcatttaaggaactgagaaactgccaaaagtggaagtactattattttatgatctcacactactgtaggatagattctgctctgctacatacttgtcaacatttagtatagtcttttaaagagctggggtatgtgtcccctctaaatctcatgttgaaatgtaatccccagtgttggaggtggggcctcgtggaaggtgattggatcatgggggcagataacttcacaggttggtgctgagttctctcaagatccggttttttaaaagtgtgtggcacctctcccaacccccttgctcctgctctgccatatgagatgcctgctccttttcatcgtccaccatgattataagctgagtcctccccagaagctgagcagatgccagtgccatgcttcttgtacagcctgtagaaccatgagccaattaaacctcttcattataaattatccagtctcaggtatttccttatagcaatgcaagaacagactaacatagtctttttaatttcagtccttctaataagtatgtaatgttatcattatggttttaatctgcatttttcctaatggttagtgatgttgagcatctgaaaaaatgctaatttttcatttacatatcttttttggtgaggtgtctgttctaaatttttgctcaatgtttcttgaattgttttcttattgttgagttttgagaattctttatatattctggacaaaagtatctgctttgcaaagatttctcccagtcagtagtttgtctttaaatcctccaatagttttcaaaaacggaaatttttaacttttatggagtccaatttgtctggtgttcttttagggattgtgctgctaatgttatacctagtaattcttcctaagcccaggtcacaaggatttttctcctatgttttcttctagagttttataggtttaggttttacattttgagttaaactttctattaatatacggtttaatgtacagattgaaggattttaaaaatatatataggcatttaattttaccaattacatctctttaaaagactgttctttctttactgaattgcctttccacctttggtggaaatcagttcataaaggggtctattttttggctctgtctcttctgtttatctgtttgtctatcttgatgcgagtaccacactactttgagtattgtagctttataattatgtcttgaaattgggtagcgttggttctccaactttgtattcccttttcagagttgttttgcttttgtaggttgtctgtattccatatgaattttagaatcagtctgtcaatttctaaaaaaaaaaagtcctgctgggaatttagtttggattgcactaaatctatggatcagtttggagaaattggccacttaaaagtatttcctcgccagacgcggtggctcatgcctgtaatcccaacactttgggaggctgaggtggacagatcacctcaggtcgggggttcgagaccagcctgaccaatatcaagaaaccctatctctactaaaaatgcaaaattagccaggcatggtggtgcatacctgtaattccagctactcgggaggctaaggcaggagaatcgcttgaacctgggaggcagaagttgtggtgagctgagatcacaccaatccagttcagcctgggcaacaagagcaaaactctgtctcaaaaaaaaaaaagtatttcctcttctgacacaagaaccaatattttcccccacttacttaagtcttttaagtttttttctgagtggtattttgtagattttagtgtgtcttatatatgtttttttcagctttctctgtaagtacctagcatttttatgctacttaaaaattgtttttcattttaattttttattttttgttgatagggtatagctttgctaaactcacctgttagtttcaagagtttctttaaagattctattgaattttcttcatagacaaacatgtcatctgcccatcaagacagtattattactatacttgttgctttttcttgccttactgccctggctagaatctccagaataacattgattagtagtagtgagaacatactcttggcttgttcttgatcttagaagaaatgcattcagaccttcattattaagtgtcatgttaattgtagggtttttgtagatgtcctttatcagcttgaggaagttttattctattaggctgtgagagtgttaatcaagtatacatgctggattttgtcaaatgctttttctgccactttagagattgttgtgtggtttttctttttagtttagaaatatgttgagttacattcattgcatttttggatgttaaaccaaccttacttaccttcctgggaaggacaatgtacttggccatgtgtgtctttcttttcatgtttttgttggacttgataggctaaacgtctgtttagaagttttatatctatgttcatgaggaacatttttctgtagacttttcttttagaatatctctgtctggttttggcctcagggtaacgatggcctcataaagtgagctgggaagggttcttttctcttgattttctagaagagtttgtgtagaataggcattacttcttccttaaattttgtaagaatacaccagtaaaggcatctgggcctggaattttctttgttggaagtttttaaattacaaattcaatttacttaattgatatgggacttttcaagtcatctattttatcttggttaagctttacagtttttgtttttcaaggaatttgtccactttaaggtgttgaattacaggcatacagtttatagtattcattaatcattcttttactatctttaaaacctcttagtctcatcacctgtttcattcctgaaacttaatttatctctttctttctcttttccccactctggctagagatttattaattttattgatcttctcaaaggtttgattatttctattgattttatgctttatatttcataggtttcagtctgaccattatttttttccccctccttactttggatttaatttgctcttgtttttctaatttcttaagatgaaaacagaggtcatggatttgaggctttctagtgtagactttcagtggtataaatttccttccttgaacactgctttagtagtatgacacaaattttgacattttgtgttttaatcttcatttaattcattctgcttttaaatttcccttttgatttctttgaccaatgagttatttagaagcattttatttagctttcaaatatttgggaattttctagcgatttttcatttactgatttttaatttaattttattgtggtcagataacccactttgtatgttttgaatccctttaaatttattaagacttgtttaattactttgaataagaactatctcagtgatctgtatgtacttgaaaagaatgtgtatttgcctattgttggttagagtgttttataaatgtcaattaggttaagttggctgacatctgtagggattttctgtctactagttctatcagttatcaagacagtggtactaaaatctcgttaggctgttcttgcattgctataaagaaattcctgagactagataatttataatgaagaggttttattggacaagctgtacaagaagcatggcactggcatctgctcagcttctggggagtactcagggagcttataataatggtggaagatgaaaggcagcaggcatctcatatggcagagcaggagcaacggggttgggggaggtgccacacacttttaaaaaaccggatcttgagagaactcagcaccaacctgtgaagttatctgcccccatgatccaatcaccttccacgaggccctacctccaacactggggattacatttcaacatgagatttagaggggacacataccccaactctttaaaagactatactaaatgttgacaagtatgtagcagaacagaatctatcctacagtaccatgagatcataaaataatagtacctccacttttggcagtttctcagttccttaaatgcatttccatggattgtcccacaaccacaaaaaaaaagaaaggaaaggaagctaaacatacactgacatatgaccaaggcattccactcaggaatttttactcaaaaaaaaaaaaagtgtatgtccccaaaaagacctgaacaagaatattcacagcagctttatttatacagaccaaaatgtccatcagcaggtaaatagataaacaaatgtggcatatccatataataaacattattcagcaataaaagggaatgaactactgatgcaacaacattgttgaatctcaaaatcatagtaagtaaaagaaaaaggggctggccaagcacggaggctcacacctgtaatcccagcactttgggaggctgaggcgggtggactgcttgagctcaggagtttgagagatgaaaccctgtctctaccaaaaatacaaaaattagccaggagtggtgatgcgcacctgtggcccaagctacttgggaggccgaggtaggaggatgagtggagcctgggaagtctgggaaggctgtagtgagccatgatcatgccactgaactccagcctcagtgacagaatgagaccctatctcaaaaataaataaataaaaaataaaacaagaagacaaaaaagaatgcacattgtatgatttcatttagataaaactctagaaaaagcaaattaatctatagtgccagaaagcagatcagcacttgcacagggaagtttctggaaatgatgagtatgttcactatcttgatgcacacaagtgtatcaaaactcatcaaataatatactttaagtatgtgtagtttattgtatgtcactgacacttcaataaagctagtaaaatataaataaaagttttgaacatgccattaccaaaatacactgtattcaaggctgtaaaataaaacacatttaaaagaactgatatcacaccaagtatatgctttaacagtaataaaattaaactagaaatcagtaacagaagagtttctggtaaatctccaaatatttggaggttaaacaaacttcttgataatccatgactcagagagaaaatcacaaatactttgaaccaaaagaaaacaaaaatactatataaaaatgtgtaggatatagtcaaaacagtgctttagagggaaagagcattaaatgcttatacaagaaaaaaagaaaagacaaatcaatgacttctaccttaagaaactaaaaaacaagagtaaattatatccaaagcaaggagaagaaataataaaaacaaaaaatcaatggaagtgaaaacagaaaaacaacacagaaaatcaagaataaagcaaggagtttgctctcatcactcctattcagcattttattagaactcctacactgtgaaaaagagaaggaaaagaaaaagtacacagattgggaataaaactgtcattattttctgacaacatagttatctctgtagaaaatcccaaggaatctacaaaaaagttcctggaatttaataagtgaatttggcaaggttgaaggacatgacgttaatatgcaaaaatcaactgtattttatgtactagcagtgaacaactggaaatcaaaatttaaaaaacaataccatttacaatagcgccaaacccaaagaaatacttatgtataaagctaataaaacatgagcataatctatatgctacgcaaaaaactacaaagctctaacaaaaaaaacgtcaaagacctaaatacatggagactatgtcatgttcttggtttagaggacttaatattgttaagatgtcaattctctccaattcatctgtaaattgaatgtaattccaatcaaataccagtgtttcttatagatatttgacaagctaattctaaaatttataaagaaaggtaaagaaattagaacagccaaaacaatcttgaaaaataagaaaaaaattgaaaggctcaatatacctgatttcaaaacttactataaagctacagtaggctggacacagtggctcacatctgtaattccagcactttgggaggccgagatgagagaatcgcttgagcccaggagttcgagaccaacctgggcaacacagcaagaccctgtctcctttttaattaaaaaagaaaaaaaagctacagtaaactagacattatgatatttaatcaagatagacatacaaatcaatagaacagaatagagtatggaaagagacctacacaggtattgttgactgatttttgacaatgtacaatggcaattcaagggaaaaaggatagtcttctcaacaaatggtactggaaaacctagaaagtgatatgcaaaaaaaaaaaatttcacccatacctcacactcatataaaaacctgagtcaaaatgggtcacacacctaaaagtaaagagatcacaggagaaaattttcatgaccttggtttaggcaaattcttagatacagcacaaaagtacaatctatttttttttaaagcgatgaattcatcaaaagcaaaagcttttgttccgccgaagacattgttggagaatgaaaagacagctacagactgcaaatatatattagcacgtatctgccaggggacttattttcagaattatatgaagaactctcaaaactcaacaagaaataacaatttttaaataggcaaaatatttcaatgaacactttaacaaagaggtacaaatggcaaataagcacatgaaaaggtgctcaatatcattactcatgagggtaatgcaaattaaaaccacaatgagatgctactatgtatcttttagaatgactataatttctataactaaccatatcaagtcctgcaaggatgctaagcaactggatctctcatgcattgctggctggaatgcaaaatggttcacccactttggaaaacagtttggagattttttataaattaaacattcacttaccatataacccggcaatccccttcctaaaaatgaaaacttgtgttcacacaaaaacatgcatgtgaatgtttatggcaagctttattcaaaaactggaaagtcagtgtcttcaactgataaatggataaacaaactgtgatacatccatacaatggaatactactcaacaataaaaaagaataaactattaatacataaaagaaaatagatgaatctcaaatgcactaagctacatgaaagaagccagactcaaaaagttatatacactattttactccatttatataatattctagaaaagacagtattgtagggatagacaacagatcactggttgccagggtttaagagttgacgagggttcaactacagaggtagtaagtaaaaaacttactacagcacaagtaagttttttatggaaaactgttatgtatcttgattctggtggtggttacaaaactctatgcgtttatcaaaaatcacagaactgtttataaaaattttactgtatattaaaaaacaattttcaaaaataggcaaaggtagttaagaaaaaaggcaatttggaaggtctaaaaaataatcaaaataacagaacatgctgggcgcagtggctcacgcctgtaatcccagcactttgggaggccgaggcaggcagatcaccagaggtcaggagctcaagatcagcctggccaaaatggtgaaaccccgtctctaccaaaaatataaaaattagccgagcacggtggctcacacctgaatctcagcactttgggaggccgaagcgggcagatcacctgaggtcaggagttcaagaccagcctggcaaacatggtgaaaccccgtctctactaaaaatacaaaaattagctgggcatagtgtcaggagcctgtaattccagctactccggaggctgaggcaagagaatcacttgaaccggggaggtgtaggttgtgatgagctgagagaccacaccactgcactccagcctgggtgataaaagtgaaactctgtctcaaaaaaaaaaaaaaaaaaaaaaaaattagctgggtgtggctgcaggtgcctgtaatcccagctactcaggaggctgaggcaggagaattgcttgaacctgggaggaggaggttgctgtgagtagagatcatgccattgcactccagcctggatgacaagagtaaaacaccgtctcaatcataataagaataataataatagaacagaataaaaacaaggtcttgggaataatatcaggtcataaaaagagggcactaagttggggatagatttttttttttttttgagacggaacctccaactccctggttcaagcgattcttctgcctcagcctcccgagtagctgggattacaggcacgtgccaccatgccagctaatttttatatttttagtagagatggggtttcaccatgttggccaggatggtctcgatctcctgacctcgtgaggggatggattttgaaggcaagacagaactgcagttttccaaatcagtgaataatgtgaagaaagtaaaagcactgagctgcatatcaagtatgcctttggtcctgatttgtcttagagtctgagaccattctaaccacataagaggatttcacatcacaagaaagaaaacagaagttcacaggctggcaattttttatactcatgcctctcgatcgagggttcttaacatacagtacctagacagaattctgggaatctgtgaaagtgagtgaaatgaaaatacatctttttaaccactaactgaaatgtattacatttccttaggttatgaatgtatgcaactaactgcaatagactgaacaggacctgcaccttcatcacttaaagaaatcacagattcttcctatcatatcattattatcatggatttgttgctatctcattttgtatgcattaataaacatatttataaaccacattaaagttttctagtattttgataactatattttatataattggtttcctctgtaatccatgtatttttaccttatgcatttagaatacattaaatatttttaaatatatgtaaagcatctaagaaagcattcataggcttccctaaaccatcaaaaggatttatggcaaataaaacgttaaaaatccctgctctagaggggaacatcacacactgggacctgtcaggggttgggggctaggggagggatagcattaggagaaatgcctaatgtagatgatgggctgatgtgtgcagcaaaccaccatggcacgtgtatacctatgtaacaaacctgcacattctgcacatgtatcccagaacttaaagtataatttaaaaaaaaaaaaaaggaaaaaaaaatccaaattattttgcctccatcttacaaagcacctctttctccagggccggtaatatccttcacacatgcatgaagtgtcactcttaccatggttatgtaatagtttacacccaaggacagatatgtatggcttttttaaaaagcaagtcatgtttgtttatgctccctagatagtactccatataaaattaaatgcatcaaataaatattccatctagtcatataaaatacaaagagagaacttaagactgaacactacaatgctaaatgaaatgtactttcagaaactacagattaaactagcttaaaaagtcaatcttacatctcacataagaaggaatttaatgaaggcatttcaaaaaggatctcaagttgatatgaatgcaaagtttaactcatttacctttgttttctaaatacaccgtacacactgcaacatcttattactcatttaaaggtttaaaaaaagggtatcaaaacaaaaccaacacaaacaaacaagccagatctcaaaggtatctacagtattaaaactcttaggattttctgggttacatgatggcaattcccaaccaagagagacatagcaggcattgaaacaatggaaatgcccacatagcagaagggagtgaggggatccaaactacaagagcgacaaaatcaactgtggatccagagacgaaaaaatgttctgtagtgcaaaggtaatctggtgagaatgatgaaaaaaaaagaaccatttttagaaaaaaggaatattagaaatattgaagtaaatatcataagtcattctattacaaaggcattaactccttcctatcaatagaatgtaccagtttaaaaatttttagtaggaatatatcttttattttataacagaaatcaagggacaaagagaatttgatcatccatacttcctactcttattggttgtcaaaatgtagccacataaaactgttcattcattttcaacttaacaaaatttcatttttggctgggtgcagtggctcacacctgtaatcccagcacttagagaggccaaggagggcagactgcttgagtccagaagtttgagaccaccctgggcatagaaaccctgtctcggccaggcgcggtggctcacgcctgtaatcccagcactttgggaggccgaggcggatggatcacgaggtcaggagattgagaccatcctgcctaacacagtgaaaacctgtctctactaaaaatacaaaaacttagccaggtgtggtggtgggcacctgcagtcccagctactcaggaggctgacacaggagaatggcgtgaacacgggaggtggagcttgcagtgagcagagatcatgccactgcactccagcctgggcaacagagtgagactccatttcaaaaaaaaaaaaaaaaaaagaaacacttgatcacttggcagaaactctacaagccagaagagagtgggggccaatattcaacattcttaaagaaaagaattttcaacccacaatttcatatccagccaaactaagcttcataagtgaaggagaaataaaatactttacagacaagcaaatgctgagagattctgtcagcaccaggcctgccctaaaagagctcccgaaggaagcactaaacatggaaaggaacaactggtaccagccactgcaaaaacatgccaaattgtaaagaccatcaaagctaggaagaaactgcatcaactaacgagcaaaataaccagctaacatcataatgacaggatcaaattcacacataacaataataaccttaaatgtaaatgggctaaatgctccaattaaaaggcacagactggcaaactggatgaagagtcaagacccatcagtgtgctgtattcaggaaacacatctcacgtgcagagacacatataggctcaaaataaagggatggaggaagatctactaagcaaatggaaaacaaaaaaaggcaggggttgcaatcctagtctcggataaaacagactttaaaccaacaaagatcaaaagagacaaagaaggccattacataatggtaaagggatcaattcaacaagaagaactaactatcctaaatatacatgcacccaatacaggagcacccagactcataaagcaagtccttagtgacctacaaagagacttacactcccacacaataatgggagactttaacaccccactgtcaacattagacagatcaacaagacagaaagttaacaaggatatccaggaattgaactcagctctgcaccaagcagacctaatagacatctacagaactctccaccccaaatcaacagaatatacattcctttcggcaccacaccacacctattccaaaactgaccacatagttggcagtaaagcactcctcagcaaatgtaaaagaacagaaattataacagtctctcagaccacagtgcaatcaaactagaactcaggattaagaaactcactcaaaactgctcaactacatggaaactgaacaacctgctcctgaatgactactgggtacataatgaaatgaaggcagaaataaagatgtcctttgaaaccaatgagaacaaagacacaacataccagaatctctgggacacattcaaagcagtgtgtagagggaaatttatagcactaaatacccacaagagaaagcaggaaagatctaaaattgacaccctaacatcacaattaaaagaactagagaagcaagagcaaacacattcaaaagctagcagaaggcaagaaataactaagatcagagcagaactgaaggaaatagagacacaaaaaacccttcaaaaaaatcaatgaatccaggagctggttttttgaaaagatcaacaaaattgatagaccgctagcaagactaataaagaagaaaagagagaagaatcaaatagatgcaataaaaaatgataaaggggatatcaccaccgatcccacagaaatacaaactaccatcagagaatactgtaaacacctctacgcaaataaactacaaaatccagaagaaatggataaattcctcgacacatacactctcccaagactaaaccaggaagaagttgaatgtctgaatagaccaataacaggctctgaaattgaggcaataattagtagcttaccaatcaaaaaaagtccaggaccagatggattcacagccgaattctaccagaggtacaaggaggaactggtaccattccttctgaaattattccaatcaatagaaaaacaaggaatcctccctaactcattttatgaggccagcatcatcctgataccaaagccgggcagagacacaacaaaaaaagagaattttagaccaatatccttgatgaacagtgatgcaaaaattctcaataaaatactggcaaaccaaatccagcaacacatcaaaaagcttatccaccatgatcaagtgggcttcatccctgggatgcaaggctggttcaacatacgaaaatcaataaacgtaatccagcatataaacagaaccaaagacaaaaaccacatgattatctcaatagatgcagaaaaggcctttgacaaaattcaacaacccttcatgctaaaaactctcaataaattaggtattgatgggacatatctcaaaataataagagctatctatgacaaacccacagccaatatcatactgaatgggcaaaaactggaagcattccctttgaaaactggcacaagacagggatgccctctctcaccactcatattcaacatagtgttggaagttctggccagggcaatcaggcaggagaaggaaataaagggcattcaattaggaaaagaggaagtcaaattgtccctgtttgcagatgacatgattgtatatctagaaaaccccatcgtctcagcccaaaatctccttaagctgataagcaacttcagcaaagtctcaggatacaaaatcaaggtgcaaaaatcacaagcattcttatacaccaataacagacaaacagagagccaaatcatgagtgaactcccattcacaattgcttcaaagagaataaaatacctaggaatccaacttacaagggatgtgaaggacctcttcaaggagaactacaaaccactgctcaaggaaataaaaaaggatacaaacaaatggaagaacattccatgctcatggatagcaagaatcaatattgtgaaaatggacacactgcccacggtaatttatagattcaatgccatccccatcaagctaccaatgactttcttcacagaattggaaaaaactactttaaagctcatatggaaccaaaaaagagcccgcatcgccaagtcaatcctaagccaaaagaacaaagctggaggcatcacgctacctgacttcaaactatactacaaggatacagtaaccaaaacagcatggtactggtaccaaaacagatatagaccaatggaacagaacagagccctcagaaaaaatgccacatatctacaactatctgatctttgacaaacctgacaaaaacaagaaatggggaaaggattccctatttaataaagggtgctgggaaaactggctagccatatgtacaaagctgaaactggatcccttccttacaccttatacaaaaattgattcaagatggattaaagacttacatgttagacctaaaaccataaaaaccctagaagaaaacctaggcattaccattcaggacataggcatgggcaaggacttcatgtctaaaacaccaaaagcaatggcaacaaaagtcaaaactgacaaatgggatctaattaaactaaagagcttctgcacagcaaaagaaactaccatcagagtgaacaggcaacctacagaatgggagaaaatttttgcaacctgctcatctgacaaagggctaatatccagaatctacaatgaactcaaacacatttacaagaaaaagcaaacaaccccatcaaaaagtgggcaaaggatatgaacagacacttctcaaaagaagacatttatgcagccaaaaaacacatgaaaaaatgctcatcatcactggccatcagagaaatgcaaatcaaaaccacaaagagataccatctcacaccagttagaatggcgatcattaaaaagtcaggaaacaacaggtgctggagaggatgtggagaaataggaacacttttacactgttggtgggactataaaccagttcaaccattgtggaagtcagtgtggcgattcctcagggatctagaacttgaaataccatttgacccagcaatcccattactgggtatatacccaaaggattataaatcatgctgctataaagacacatgcacacgtatggttattgcagcactattcacaatagcaaagacttggaaccaacccaaatgtccaacaatggtagactggattaagaaaatgtggcacatatacaccatggaatactatgcagccataaaaaaggatgagttcatgtcctttgtaaggacatggatgaagctggaaaccatcattctcagcaaactatcgcaaggacaaaaaaccaaacaccgcatattctcactcataggtgggaattgaacaatgagaacacatggacacaggaaggggaacaccacacaccggggactgttgtggggtggggggaggggggagggatagcattaggagatatacctaatgttaaatgacgagttaatgggtgcagcacaccaacatggcacatgtatacatatgtaactaacctgcacgttgtgcacatgtaccctagaatttaacgtataataattaaaaaaaagaaaccctgtctctatttttttaaatacatttttaaaaaataaaatttatttatttaaaaaaatttttttaaagtatcatttttatacatataaatacaatttttgaaaattttaacaagaatataatacattcaatctataataatttgtcatatctctaccaacatcttaaaattttgtttatttgtttgttgagacagagtttcactattgttgcccaggctggagtgcaatggcacgatctcagctcactgcaaccttcgccctccaggttcaagcgattctcctgcctcagcctcctgactaactgggattacaggcacccgccaccacgcctggctaattttttgtatttttagtagagacagggttttaccatgtacgccagactggtcttgaacttctgacctcaagtgatccgcccgccttggcctcccaaagtgttaaaattgcaggcatgagccactgtgcctggccagaattttttattataagcagtcaaaataatgagtctttgaaattattttttctgattacagaatcactttgtgctcactacaggaaacttgtaaaatataaaaagcagaaaagaatgtcccataatcttaccaacaagaaacaaccattgtaaccattttatttcttgtatgggtaccatcttacagtcagtaagaatactattaattaatacttattaaccacttcctttgagatattcagctaagagttttccaaacattttcattttacctttatattcaagtagtaggtgaacattttacagttgtgtcaagtagggtttaaagaggttaggaaacgtgcctaaggtcacagagaaaagtggtagagctgaagccagcatccttgatcactataccacaccactgtcaatgtacagatacagacaatgccatacactactccttgcttctaaaattataaatataatttttagatggctatttaataacagcacttggatatatagtaactttactgactcactcctctcctggatcagattattttcatattttattcaggatagtgtgattcattcaatacaaaaaataaaaactagataaatgcaagacttgcttgtccacttctaaatttaaattaaaatatataattcaacttactcttttactgaggcaaataactggccacatactgcaacctaatgtgcagcagcaacaaaggcagccacaaagtagccaacgtacattaacaggaaggttcttcttaagacaactgttaactctgttgatgctggctttaaattcttcaggagctacctaaagaaaaattttaagaaataataacaatgcaatattaatgtcaaaaaacatgactgatgagcatacttttttctaattttctcagaaaaaaactttcattttgaggcatacaaatagtacataaatgagacactcacttttccagttaatgaagaagggaattcagattcaaatttgttgctcagtccaaatctattttaaaaaataagaagaatatgttattacatgttattgttgccaaaaatgtagaccatttaatttaaaggtcaagtcaatagaaagcattttcacatatggaggaagttttagacataaaatggaagtttgagataaaataactgtaacaagcaatttatgaaatgtaacaattattttagcagttaaatggaaacttttgcataatgataaggggctgaatgttaattaaccagcagtatgtaaacaaaaatataaatggttcatttaatttgagctaccaactttatatcttaaaaagtaactacaaagcatattattttaatgggtgggatagcgattttttccagcttttaatgttattggtggaaacaaacaatacctgtgaattttagcaggtgtcctacacaagcaataagatgagaaggaaaaatgcaggaaaaagagtgaggaggggaagaataaggaaaaagggagagaaaaaataaaaaagtaggaatggacaaagtgctaccaagaaccgtcttaggttccattgaacacctatttgtcagtgcattagatggtatgaaagaaaatgtagacgtgtactatacctatatctattcctattacctaaaagaccttttcttgaatcatggttaaaatattccatggctttagaattgataaaagatttaaactattttcaaagaatggtaaatataacaagaagataaaagacataataaaaacaacctatcttgcttttatctatcagaagtctaccagtacttggagaacagagaattcattcaaatcacaactactgagcacattccatgcaacacttcagtgcaggcttttatggcttttacagcttcctttgtttccttaagaaatcacacacgagaccaattttacttttatataatttgagataattttgaaagttcatgtaatacactgtaaagttttgaaggggggactccaactttacacctaaatctaaatggaatcttgaaacaggcttgttttactcatatcccacatacatccatttcactatctctacattcctccagtctatagtcataactctgcaaaccactccaatctgttatcctgctttctcatgatcatcatattcaagtttatctttcctgatagaccttgaaaccctcaatctgttgatctgcagctatcaggatacctccttatatcttatcttaaaaaacaaaacaaaccttaaatacatacagtcatgtgccacataacaacgtttcagtcaggacatactagaaggtggtcccacaagattttaatactgtatttttactgtaccttttctatgtttagatacacaaaaacttaccactgtgttataactgcctacaatacacagtacagtaacatactgtacaggtttgtagcctaagggctatgggctataccatatagcctagatgtgtagtaggctacaccattttaagtttgtatacacacactctgtgatgtctgcacaatgatgaaattgcctactgacccatttatcagagtagtccccatagttaagcaccacatacttgtatatatcttcactttaaccaaaaaccctgttgaaatgccactctttccttagaaatcctcaactacagttcactcctgaccttatctattctaaagaactttacctcctgcacctccatctaattcagcaacctactcactgtgatatattctgcatattgtcatcacttgggactgtatcacctctgaaattctgaactgtaaaattcttctcttaccactgccatcaatcatttcatttctcccatccttactaaatttgttttttggcctctggttgtaatatattgcttcccacccctccatagctccctatgactccatttccttccttatttgccagaactacatagtcaatcattttgaacatactccaacaaacacctttaatcatctctacagtgtcccttgccaacccaggttcaattaaattgtttaccttcttcacactgcctggagctactggagaaaaatcacatttataaatgtatcaccaataataaatatatatataacatacatatcttatttctaatctcatgagtattattgtaacaatctttattcatccccagtaagttctcttttccatgctccgtagttgttgtgcctgtctttaggtactccactttatcctcacaaccaacatttttttgcaaataaccacagttgtcaactctgagagaaaaaaatgtcatggaatataaactgctttaccttccctcccttttatttttggatttacttatatatcttcagtatttttaccatctctcaatggaggaaagcttccaaaaactaaccatttacttctgagtgcatctcctccagtctcctctgcaattcactgtatttctacctcgcttcaggctccttaaacatagcctacaaacctgaattagtctatccacctgaggatgtgaatccttatttcttcttctctctcaatgtctgatggcatctatttctttccttcctcaactaatgttttgaaagactcctttacattaactatctttacgttacctcccattcattattcaaactaccacaatccaggctttcctacacacttctttactaataagactgttctcatcagagtagttgaaaacaactcttttcagcaagtcttctttcatatagcatgctttctcctggcaaagagcttgaatgtcagaatttcttatttggcacaggccacagcaaatatctcctttgctatgtttttcatccctgccaaaacctttttttttaatccaaatctagaccaaccaaaacaatagtagcaggtagaattttagcaagacggtcttattttattaaatggataggaaaagtcacacttcttgtttgataatataactgtaaaatatcacctctaatgatttatttttgacataaaccacttaattttgacaataccttagttctggcttcttttttaagttcagcaggaggcagagactgttagaatgaaaatggcatctatgttttgttttcaattgacagcattataaatgtacctacaagtttacataaaactttttatatatggtaaaaataatttcctttattctaagacaaagtacaactggttcagcacagtattagaaaggccaagtttcatcccataaaataataatttgatgtacttgaaagaagagcaatgattcctgcattgagtaggaagctgaacccccttcagactctaataaccaaacattctactaatccaaaaagccagaagtaacacttggataatttttaaaaatatgatttaaagtaggtggcatcttaattcagttatctacaagactaattaaattttaaaaaatattttatgttggcaagaaggtcaagatggaaaaatatcacacactgtcaatggaactataaattgttacaaccatttcagattaatttggcattgaaaatatttatacctttgtcatactgttttctctttagaaatgtaatattacctaaaaaataacttgaaatgtggattaaatttatgcataaacaagttcattgaatctttattcacaaatataaatatgtatctatttacaacattttaggaatggttaagaaaattatcttatctcaatataacagaatattaaacaaccattaaaaatgaaatttgcaaactaaaaacacagaaataccattgaacataaacttatttaccttccctccctttcatttttagatttatttatgtatcttcagtatttttaccatctttctcaatggaggaaaatgttgaagaagaaaattcaatataccatgatattaactgaaaagaacaaaaatcttgcaagttgatagaattttcaggagtgccatctggtagtatgtaaaacgggtcttaaaaaatattcctaccctggctgggtgtggtggctcacacctgtgatcccagcactttgggaggccaaggcaggtggatcacctgaggtcaggagttcgagaccaacctggccaacatggtgaaaccccatcactactaaaaatgcaaaaatagctggatgtggtggtgggcacctgtaatctcagctactcaggaggctgaggtaggagaattgctggaacccggaggcggaggttgcagtgagccaagattgcgtcactgcactccagcccgggctgacaacagtgagactcagtctcaaaaaaaaaaaaaaaaaaaaaaaattcctaccctttgacccagtaattctacttccagaaatgtatcaagagaaaatagctgcagtggcacagatatgttaatgaataatcaagtattctgcagtgttattttagggagggggtattaaagacattttgtgtcatttgtttttttttaaataagagctatttttcagaaatgtatagttcctgctaactaaataattgacgagtattttattttatttttttgagacagagtctcgctttgttgttcaggctggagtgcggtggcgtggtctcatctcactgtaacctctgcctcccgggttcaagcgattctcgtgcctcagcttcccaagtacctgggattacaggtgctcgccaccatgctgggctaatttttgtatttttagtagagacggggtttcaccatgttggccaggctggtcacaaacacctgacaagtgatccgcccaccttggcctcccaaagtattgggattacaggcgtgagccactacacccggcagacaaatattttataatgtacaataccaccctaattttgttttcttatttgaatattttatttggtattaactaggtattttaagataagtaaacaaggaaatttaggttcactaatcaatagttttcttgaatgcatttcaatgttttccatagttcaagtccatctaatcctctgtccttcttacttcagttttaacttcttctatgttccttgtatctcctcatattaacaatgtctcttggcattcactactgagctatcattttaaattaagacatgttttgaactcataacgaattttgctttttaaatgcagaaatgcaagaatccactgcttcaacttgttttgcccttaatcaaaaatatatgttcaatgtttcttttcttctgagttacagtgatatttttaacagtgaaatttttaaaacagaaatatcttataattaaattaattataatacaacaatctgaaaagatgctacacagctcaaaaccatgtatactagagagagtagtctgttactccgcatgcctaactaggaactccctatactttggctaattagatcacaagtgggcatctgctttaagaacagctaatccctgggctgggtagcagcacatggaatggcaaggccaaacagtcctgcctaacttagataacattaactaactcaatcagctctctcttgaggtatctgaacataagacaaatagatggtaacatgcagagctgacagagagagggcttaaattgaagtcaagatgtagtaaagccatcgataattagaaatcaaaataaactgaagccaatagtaagcagaaactgagatcaccagacaagtaatgatgggccagatcagggagggtctggtagaacattaaaaggactctgaaggagatggggaacctttgaggggcctgatacagagaaaagacttgaactgacttatgttttaaaaggatcactatagcagatgtaccaaaatggttgtataagaggagaggcaaaggtggaaaggtggagacagggggaagaaaaaaatatatatatattttttgtaatttagatggattcttgctatgttgcccagtgtagtctcaaactcctgggctcaagtgatctttctgcctcagcctcccgtgtagctgggattataggtacatgccaccataactgacttaagaaatacattaagcgtaaggcagaagggagactggcaattcactccagtcgtgtaggtggcaaaatagggccaaattttgaagacagagccaagatgtcaagacagaatggatgtagtgaaagagaaagaggaaaatcaagaatacatcaaaaagtttttgatctaaacaaacagggtcctcgatctgccatcaactgagaatggaaggctgccgttgaagctgatttggggtgtagattatgaattccattttggatattctggattctgagacattccacctgtacaaatctatagatacagagaatttttatgttcctacagatatgacaagacctatgagcatatgaactagaaatttcaaactgaacatattggttatgcagatggcacatgaagagagtgcttatttcctaatgttgaactttgagctcaatgaactcaaatttttagctagttttggagataaagtcataactatggaaaaaaattaacaggctttgatgcatataaatcatgctttaagtttatctggttgattcaacatacgtctgaatatcaatgtagctcaaggaggatgggatctaattgaaagtatactctatttatacaaaagatacagagaccctggagttggagacgtatatttgggtttcagaataattctaaaaatcttaactctgtaaccacattctgaacaatatttgagttcatctggttttatgaaagtttaatctcattcaggaaactagtgaaatcaaagacttaattctccaaagcatgtgttaaatttactctatcataaacctcaccattatacatagtcttataataatctagcattagcattttatcaatttttaattattaaggttataatttccattattaacagattaaatatgttgttaagcagtgaaagctatataagtgtatactgatgaaaatgcacagtataactaacttctggcgatatagggatgcagctgatctaacttaacaacttttaaattttctgaactacagaaaaaagatttttgtatatctgatttatacatattttagaatattcttcatacttctataaatcttaagagcaaaataatgatgctaaattatgttcatttaagcaaaatatatggttgaattgatttacaatatagactaacaaaaatactcatttcaagtaacatttataattgagcagtttagaaaagaccaagaaaggagactgggtacataggaactccaccactgaactaaccaaggcccacattatgactacaatgcaagatcaaagagaataaaacaagaagttcttgcaggaagctcactatatatagtacattcactttttttatcaatcaaaataacaaagttaggttaccttcaagtccaaccaactctatcctaagtagatagtgggagagaaaaaaagcttaagaacaaaaaaattattcttcagggacactgtgagaacatttcagctcctacggatgcaactgagttttaaatgtaagatataaaaaacacaatttttttcctcaaatctaatgaatcatgtactgagggctgtcacatactacacaccttacagctaaaggatatcacatttacgagggttcccacttcaaaatctatgatcttgtgggaaacactctctacttctggcatgtgctattctcttggcatactagctgccccagcagcagaacagaaagtgcaggtatgccatcaaaatcactcccagtgaacagtaagggtagccagttatttaacctcagcctacacaaagctaaaattaaaaaataaacagaccaaaacaaacataagaactgaggaattagacagcaaaagtggccactgctatgtatttccatacctcataggaaaagctgtgaaatttgatggtttacacacagaactgtaataactcctttaatctagagatcaacaccctagctggggccactatcatgtcttatggaagctgcttctataaccttctaaatttcattctaattcctttacaatcctttctggcccctactgaaccctccaacctcatttcaagacattatcccctttgttcactatattctagccataatatagaggtatcctttcagttcctcaggcaagtcaagcttgttttggcttggagtcttggcacctgctgttctccagatccaggggctcctgacaggactctcatccttcctaaatgttagcttcctcagagaggttcttcctaatcacattattttcaatcacaggatctcatccatttccttcagtgcaactttatcagataaaatttgtctattagctgtaaactccatgagggcagaaactatgtgtgtttcattttgggtttcattatatacccagagctttgtgcaatacctggcagaaaaatgggcatttaacaaatactcattaaattacttatcaggaaacctcaacaagacagctgataatcaaagattaagcaaaaaatactctgagaaaacaaaataaatattgtaaaacccaagcatcaaaacccaagcatctacattcaacaatcaggatgaacttctcttactttatatgcagttctaataaggctggttggttgttttgcttccaagaacagctgaccaattacaaagacagaagaaagcaaaccaaaaagaacagcccacatatgaaatttaaatgaaagtgccatttagagaaggttctcaaactccaacatacctcagggccactaaggcatcactgtgtatcaatctgatagccgcttttgattaaatgattcctctagtcaattagataattctgagctatgctcagaatcttgttttaaagcagaaaagcatacttcacattttagactgacttcccacaaaatggtaaagaataaccaaaaaaatgtgcatgcagggttaaacatcaaaatatgtcataagtaataatttattgaatgcctattaattagataaattctgactctcacacgtaacctctaaggtggatattatctctttcgcagatgaaaaaactgaagttcggaaaggttaatctgcttatggttactgtcaggaagtgactgagaattgaaaccaatctgcctcatatcaaagaccacactttttccacagtaccatctattactttccaaatatgtctgatagaatcacataacactcctaccaaaaataaaaatccctagactcttcccttccagacccaatattctgattgggtcaaaagtcacatacacacatacacacacatacacacacacacacacacacacacacacacacacacaatcttacacagaagatacctgaaggatacttaagagcatctgttgctacatgttatatttaaagcttaattttattaataaaatctaaatagctttatagcagattagaaacctaagccagacacagctattagagatttgaaagatttctttctgagtatacagctggcctaatatcctgggcctttaacctgttgacagtataaactccagctggaattctgctttagagtaatattatttatttaaattatttagaatagtatttgattagtatcataataattacatataatttacttttcaccatttaatccctcttttccacttagctagtcatataaaattttaagtactaatcaatttcatatcccttggtaggcaaaaatccaacactgaactctttggaccaaatgtcatataaattctcaaattcaaatacagtaaaaactttgaaacctcagttaattatcatatttctcatttcttcaagaaaatctgtgcattaagaagttttagtagttggtccaaataaaatgcatagaattttttcttcacattaccaaagatatgtattatatcaaattaccaaattataatcaaattaatttcctctcaaactatatggaataagaaaaatctctgggaagccacgcatggtggtttatacatacaatcccagcatttgtgggggctgaggcaggaggaacacttgaagccaggagttcaaaaccagcctggcaatacagtgaagccccatctctacaaaaaccaaaaaactaatttttttaaaaaattagctaggcatagcagcgtgtacctgtagttctagctacttcagagactgagaaaggaggatcactagagccaggaggtcaaggccacagtaggctgtgatcaggcccctgcccaccagcttaggtgacagggaaagattctgtctctaaaaaaagaaaacaaaaatctctggagaaaaaaaaaaaagttataaaaaaaaaatctaccttaatttgataatttcctcacaattaccagatttcattttttaaaacagaggagctatttatcttttcagtgtgataagtattctattatagaacattgtttgcctttgttcggaggtgcagagaagaaaacagtgattcatttggcaattctgacaaaatccaaagatgtatacaattacttcattcatttagaaaatattataggaactataatattctggacactatattaaatagtaaagaaagatcaatagacacaacctctgccctcaagaacttatagcctgtggagatacatcaatgaagccttcaaaaatttcaaaacagaaagcttaatctttagaaataaatagaatgtgtcttaaatattatgctgggtgggagaaagaagtaggaattataaagtttaacaaaattgttttattgacatgattctgtaatttggcaactcacattcaggtctcttactgctaaccacagcatctagcagcagtcctgaaatactgacacatttcaagacaattttttactaactctaccatttgaaagatcaataaacactaaggtgttcttgtgatgtctcttattcaaaagtcatattccatcccagtgtagttcccaaacattttcaagtcacatttctaaatctttaatcttccataacatatctggaatgaaaacaagcaaaaagtggtttccgacagccattgataaaaactggtgttgaaggataaggaattatttgtggagatggtaagattacacctcagaagagagtacatgaagacacggtaaaattacaagagaataacattagaaacaaacctcagcaaaataacttggctctatgatagggcttgagttagaagtcaaagattatacatactctaggaaagccccaagtttgattctgatacaagaagggtagaaagtggagatgggagcaaataatgtctgttataatgacagattacctaggaaatattggcctaaaactacttttaaattctaacttttagactgacacatcctttagagttaccactgtgaaaaacgaaactcttcaataaatgatcaacatattttgcaaatatattttgaagcataaggaactccataattttaaaatattaaccaatctggtcaagactacctaatagtctttttacagtattactgtttattttagaaactatttttcctcatcgtcaattatatgagaagtcaccatgaaagcaaaaaggaaatctacttttaattgaatggtgactgtaagccttttaggttacatgtacctaaatactatgcaataacaggaatttatcatttattttccttccttccaataccactttcctcaaaatatgcttctgcacaagatttccccatattgctacctagaaatctaacaatgaagggaaatattatacttaaacagaagaatgtcagaaaagaatactgatcatgagagaagtataaaaagtaagtctgatttgggggtcacgatgaaaacatttgtatttaaaaaaaggaaaatatttgcattaaaagccactttaaagcagactttaggcaaattaaacatgttgcatcctatgtcacaaaaatctgattatgcctagagactaacctagagaatggaaggtaactttctttctcacatcaccacaatgacatgccaatcacgtcacgtgagaataccagtttctaaaataaacagtaatactgtaatatattaaagtagaaaaaaagagcagaaatagtcaattgtaaagggctactcaaaagttacatctgtgaaaaacatatggattgatctatatccttctagactgatctagactacagatgattcagtttacatggtcaattactttcaaattggtaagggaagactgctctgatcagcacctaataaaaaaaaaaggtggaggagggggtgttaaatttagccagtcttactacaactgttctaatagctcttcccatttatatttaaagcaagaaaaattgaatgtgctcaacagttatagtaatacatatgcaccaattctaaaaacctttatagatgttaactgggctacccactggcatggtgtgctagtgtgcctgggaattatgcatgacagagccatgttaaaaaaaaaagttttctattattacctatgtcgccacaaaacaggttaagttttcaatgcagaaagatccttattgtcatcaaaatacttcaaacacagtaatttaagcacatacacattgcttagaaatggaaaaataagactaaggtgaatcattgttatgtttgataatggcagttctaattttttagtactttgttttacacctgtttctcaaagtggaaaactatatctgaggaggagaataataaaaactagtatctattgaacatagtaccacacagtgcaataaattcttttcatgtactatctcatttaatccttaataatcttaaaaggtatcgactataactatccccatctcaactaaaggtcatgaataaacaatttatccaggaagtagctgagatagattttaacccagagcctagaaccaagataaatgggagaagaaggaagttgctgaggaaaatcagagatttaactcacaatgtagaaaggcatactgtttattgatgatagatagtccctccctataacctggaatagttttcaatcttggctacacattagaatcacctgtgagattttatttatttatttatttatttatttattattttaactgtccactcctaggaccctcacttagtatttggccttcaactggcctggggtggagcaaagacaatggtctttttttaaagacacccaggattctaatggacagctaagtttgaaaaccactaataattattttctaccctattaacctctccacgtagccaactacaatcaagtttactgattacctaggttctgagcactttgcccactattgcattttccacttgcccaacaaagtgcttagcttttcttctccttaacagaggaaacattacaactacagcgtcgcctttttaaatgacaaaattctctagcttttctttgacatgaggaatgtagaaggagggatagatggcatgacaaagtttggaaatcacttctttaagcatccacatactccttaggcttaaaacagtgcaaaaaggtcctaaaagtcaaaataaaatcaaatggcaggttatgaattctgtgatatatgttaaaagtttaatatccatgatatttggttatacttcttaagctggtgacaacacttagaaagtattattgtggtgaattaaattccactgtcttgtcatggtgctgtgatggcaattatgcagtgtttttaccctgttaagtcacctgaacataaactaacaggtactaaagaaattaaagcattacataagcatactcaaacaacaatatggctggtcatacgagaaatgcaattattttgctgacaaacttatatgagaagtcttactgtttccctaagttattcacagcacatcccactcactcttcaccaaaatataatgaagactattccagacattctcagacttgctggctcttttgtttcactgaaaaggtgaagaagtacagagatacctgacaagtatggaagtctgatctattatttgaacaagagatctaaaatgagagagtatcaatgtaatacatcaagtggtacaaaactgtggacttcatagtgaaacattacaaaacttcctgcttccggacagctcattatttggttcaaggcttcacattcctttgtcatggtctttccgaaagctttcattccttattaatatcagacttttaatgttactagtgggactttccaaattaacaagccccaagttcgtgccccaaggaggagcttcaggactacaattttccctcagtaacctgagcagagtgtatgtccctcacgtagttgttgttgttgttgttgtaaacatatttctttctgtatatcttaaatttgtgttcaactatatatttttatcacgtacaattacaagaacttgcattagttctgcggaaattagtggaaaaactgggagacctgtgggtatgtgtgaaatagacacgaaacggagcttcgctgccaattgtcactggggtctcacacggcccagatctggcctctgagccatgtcactgggtgcaaaggcacagacaaccacagggtaactgggcgagaaaacaaggaggctccctgtcaatacacgtacttccaccctgaagaggaagggtggcccgcagggcagaccctaatgaaaacccgtgcctactgggatcgtcacatcgcccgggcctgtagggcctgctaaaggggtgtgtggaggaggaaggacagcgtccgtccccacttcggagacccaaacaaatgaaaataagccaagttctcacttcctggttgcctactctttcggaaggcccccgacaccagacggacacaggggaaacggggctcccgtggagtaacggggcccaccccagcccgcacctcccgccctcgccctcctccgggccttacacggtgacgtgaccggagccgcggacgaccaccgggtccggcgagtacttgagcagctgctcctccagggcccgctcctcgtcctcctcttcctcatagatttcgtcgaaatccgccatcctgagcctccgagctcccctgcccaaagggcctgactcccggggttggcgccggggtaccggcgggcgaggcggcggaggctgaggggagtcgccgctgccgccggctccgaggccgcggagttcgctgtcggctgtctcggctccggctacagaggggatggggtctggaccgtcgccgccaccgccgccgccattaccatcagcaataacaacaacacaatgtcaacatccgcccagaggccgacacctccacaagcacagacgccgctgccgccgccgcagcagcagcaactcaggaaaccacagcaacagcccgagccacccgcagcgggagcagccggctacggcatcgcgagacttcccgggccaacgggcgggcgggcgcgtgcgtgggcgcgtgggcgagcggactggctggcgggcgggcgggcgcgcgcacgtgcggcctcgcgcgctcccaggccaccgtctttcctctgcttctacccgcagacggcgaccggggcgcgcgctcccgccggcgggcccccctccgccgacttctgggtggcggaccctgggggcggcggctccgctgactggaggccgcgacccgcgactccgacaacgcagcttggaatgtccagtgggacatgcagttccccaaagtcatctctaaccaaaacaaacaactgaaaagaaaagccctggctggaatagacacatttttgtgcgtgtcattgccagtttatctaataatcgcatctcgcttttcctcaggttttgagtctatgatgagaaccagagtctcttttttcccaatttgaggagtccagcagagacactgcaaacatttgtgctcaccacaggatttttcaagacatctccaaattcaaacatcttatcccttgatccccttaagtataatccaatatatgaggccagcgatgctggtatttttttttttttcttacaagaaatctcaccgtagtcatgctatgaaaaaaaactgataaattacctggattccatattagaagatgcagtttcttgccccaactctctcaccaaacataacctggtttttgttgttgtttccttaaaatcttagggaattcctttccttttcttaccagttcctaccacaaaaaagacctgaaagaaagggcagaggagaggaagaaaaggaggcaggaaggaagaaaggatagaaggaaggacgagaagaatgaaagaagaatgggagagaaagaaagaaggggaggaaggaaggaaaaggtttaatggagtctacttagctgcctagtaacagttgaacggtcactttgggtacttggtttcattaagcatataaacagcacaggggaaggagtgggcttctgagaagagagtcctggacagtgaggatacaccatgggagaagaaaggatagttctactgagcccagcgctggtcaggctcttcaagtgcagtgttcatgtcacagtagtcggctttagatgggtcactgttgacgtggagaaagtgcaaaggaggtcaatgaggacagtgagagatgccaacctccttttggaaacaactgaaggaaatgagtgtggttagccaagaaaaaatgaaggaaaaatacagtagttgtatcagacttattgtatccctccctggagggtatttgttcattcaacaaatatctactgaactctagctatgtggcaggcactgtggacgtgtgtgaatgaggcacaggccctgacttctggtagcttatctattgttaaggcaagcaattgtcatctctgccaggggctcatggaggaggacacaggaagtgtcagtggggcacacaggaggcagcttggtctggtgtttaacaatgtgtgttctggaacctgactacctggccttgaatgtcagctctgccacttactgtgtgaccctagacaagccacttaacttccctgttcagtacctgccccattgggatgctcagcagattcaagggcttaagatcggtgaagtgcctagaagaaggcccagtacacaataaatacggggtaataggtgatgcttaaggctccctagcttatcaaccctgtgagggttaccacagcattatgtaatattttactgcttataaagcacgtacataatatatcatttaatattcccccaagaacctgtgaggtaagcaaagagggtgtatttattttcagatatgctatgtttcagagatgctatgatatgctatatttcagagatgctatgtggctttctcaaggccatgtgacgatttaagatttaatggtctaattgagtatactggtggtccaagctttcctgaatgtcttttttttttttttttttaagacagagtctcactctctcacctaggctggtgtgcagtggcaccatcatagctcactgcagccttgaactcctcagctcaagcgatcctccctcctcagcctctgaatttcctccttggcaggaaccaggagactagtggctgcactcagttaaaggaacagctgcaaatgggaagataagaaagagaataagaggaaataaggtcagtatgtcctggcacagcccacacctggctgtggctgagaattcacccttatgtagaaacagtggccaagataaggggctagtgccccaaagtatctaaatcatcacatagctgacaacttcccaaagacggaggaagccacacagagctccttagaactccagcaccttccacagttcctgcttcagaaaaggagcttaataaatgttatctgaattgagatacagtgttactagtgctctttccagaacactgtgacttaattaggcttcagaggactgtgagaacctcactcttatcttcacactggctggatgtgggagaaatgttcttattctaagatctattcaacagagagatctttgtaactcccacggcctgggtatacggtagaggcagggaattgccttttctttttcttttttcctttctgtgtgtgtgtgtctgtgtgtgtgtgtgtgtgtgtgtgtgttttcttctttttcctgttctgaaaaacctgtcagagccagcaaaagggtgtgggacctaggaagaaggccaaaggggtgagcgaacatgagtcaaacattttcctgatgagagttgacatcgtaattccaaccctccacctccgccctgccaaccttccaagatccagtttcctgtaaaactcctcccccaatttcttcctggagataagccacttttccaggatcctctccctctgtgtccaggtactcacttgcaccctgctaagtgcccatccctccatagcctcctcttcattggagtttctctttatattcttgcctcacatattttcatatttacctttagaccaaatggctcaaaaccaaactggataatgtcaggcctcaggagtcagcaagacttgtttttaaggcaaatattgcttagttaattccttagacttgaaaacttcccagttccatttctacctagcagagtggccattggcagcttcacctttctaagcttccttttcttcatcttcaaatggaaactatgtcatggggttctggaagatcaaatgagatcgtgcatgtactatggactgaattttgtccccccccccaaattcatatgttgaagccctaaccctcaatgtaatggtatttggaaatggagcctttggaggtaattaggttgagatgaggtcaagaggctggggccctcatgatggaatttgtgcccttacaagaagaaatactagatagttttcgatctctctgtgccatggggacacagcaagaagacagtcatctgcaagccaggaagagaactctcaccaggaaccaaatcatcaggaactgtgagctaaatttctgttgtttaagccacccaggctacgatgtactgaatgtttacatccccccaaatttgtatgttgatatcctagccctcaaggtgatggtattaggaaatattagggcctttgggaggtgattaggttatgaaggctgagccctcatgaatgggattagtgccctcataaaagaggccccagagagctggtttgccccttccactatcttagaacacagcaagaagacaaccatatacaaggacgaagcccctcaccagaaaccaaagctaccagccgtttgatcttgaacttccaagtttccaaagctatgagaaataaatgtttgtttataagtcacatagtttatgatatttgattatagcagcccaaagggactaagacacagtctatggtattttgtgtggcagcctatttgtgtggaaaatacactcaatgtgctttttcctattctcctgcttaacaacaacaaccaacacagaagactctctgtgaccagatgtgttggggggttttctccaccaacaagcaagcaatcagttctgcagtgggcaccagctgtatgtcctaattcaattccagcactctctacctggagatagcatcaaatcccacaggttgagggctcagtccgcaagactgcaccctccacttcaaacaccagtcacaagtccaggtctccagaacttctgactgaccagctataaattggggttcccacaacaccctcgtcaagttcaactaatttgttagagcggctcacagaactcggggaaacaggtttaccagtttattaagaaggatatttcatttcatttcatttcacttatttattgagacagaggtacaatcaccattcactgcagtccaatagttatttatttattatttatttattgagacagaggtacaatcaccattcactgcagcctcaacctccctgggctcaagcaatgctcccacttcagcttcccgagtagctgggaatgcaggcatgcaccaccacatccagctaatttttatattttttgtagagatggggtttcaccatgttgcccaggctagtctccaactcctgggctcaagtaatctacccaccttggtctccaaaaagtactgagattataggcatgagccaccacacccagccaagaaggatcttttaagggttacaaataaacagccagatgaagagacacagagggtgaggtctggaagggtcttgggtgcaggagcttctgtccccgcggagtcggggtgctctgctttcccagcacacggatgagttcttgttcatctccctgtaatcctccacgtgttcagctgtctggcagctctcagaaccctgttccttcagggttttatggggcttcattacgtaggcatgattgattacaccgctggccattgacttaatcttcagccccttctggtgatcagctctcatcctgaagctaactaggagctgccagcctacagtcaactcactagaatacagaaagacattgctttggagtttctaagcattttaggtgttgtatgccaggaaacagggtcaaaaaccaaatatgtatttcctgatatcacacagcccaagctgacttgagaaagcatataaaccctcatttgttcactcattcattcattcaacaaatttgcattgaatgcttctcatgtgtcacatactgtgccaggaactagggatttagcagtaaaccaaacacagcccctgcctttgtgagcatgaagtccactggggaggactgacagataattataaaaataaataactattagaattgtgatcagttctgtggagaagcacaggggtccatgggagtagtaaacccacctaactcactccaagaaatcaggatttattctctgggaaaatgacatgtaagctgatgagctaagcaaaggtatggaggtagggaagtagagagaagagaggagaaagctccagacagtgggaatagcatgtttaaagaccttgaagtagaaaagagcacagctcaaatgaggtaaaaaacaaagccagtgtgggtggatcatagtgaggaaggcagagccagattggagttgaggtcaaagaggctggtggaaacttgatggcctttgtaagaaatcttaaatgcatgccaaaagtaaaggagcggaggatgtgaagccaggcagtgacattatcagatgtgcatttttattatttatttatttatttatttatttatgtatttatgtatttatttatttatttattttgagacggagtttactcttgtcgcccaggctggagtgcaatggcacaatctcggctcactacaacctccacctcccggattcaagcgattctcctgcctcagcctcctgagtagttgggattacaggcatgcaccagcacgcctggctgatttttgtatttttagtagagacggggtttcaccgtgttggccaggctggtcttgaactcctgacctcaggtgatctgcccaactcggcctcccaaagtgctgaggttacaggagtgagccaccaggcctggccagatgtgtatttttaaatccccaagtgggagaccagtagtccagcctagcctgcctgcaccacttcccagcctgttattctgtaaatggcacacattctgtaacaacactctcaggatttttagtaaatcatatcccctccatcctcagtacatgtgattaggttaagctgaccatatctccagttccaagagtgggcatctgacctaaaatgttcaggttgtgccccaaccttagagtttttggtgcccgcagtataagtaatagaaaatagcacttctgctccaatgctttaggattgatgtatgtgcaatacaactatgcaaaaggcctttagagagcaacagagatcctcttcgccttccatacaactgtggccactaaaggagagggaaggaagatgatctaaactaggctgggagcttcctgagagcagaaccaattatgcttggagaaaaagctaaatgtgtatatagattaagcatccttaatctgaaaatccaaagcttgaaatgttccaatgagcttttcctttgagtgtcatgtcagcacttaaaaagtttcaggttttgaagcattttggattttggatttttagattagggatacacaacctgtataacacatatagtattccaagcactattctaagcactttgtacaaatcaacccacttagccttataagccttgtaaacattcctataacataggtaccgttttcatccctgttttagacattataaaactgaagtacaaggaagttaggtaacttggccaaggccacacaactaggaagtggtagagccagaacttgaactcaaataggatctttcctcatcccataatcttaccactatgctacactggtcttaaacaccactagagaaatatttgggttccttacatcagtcttcctaacacctacaacagtacctgccatataattagtgcttaataaatattaaatggggtcaagcacaatggctcacgcctgtaatcccagcactttgggaggccgaggcaggcagatcacgaggtcaggagttcgagaccagcctggccagcatggtgaaaccctgtctctactaaaaataaatactaaatggatggctacatgtataaaatcatattttccagatcatttcataccatgtgtacacatttggttcaaaatttgtccctaaaatgttgttataataaatctatgaaatccatgttgtttctcttagattctcctggagtaatatctaaatctaaataataataatacctataaagtatctaatttaggctgggtgcggtggctcacgtctgtaatcccagcactttgggaggccaaggcgggcgaatcacgaggtcaggagttctagaccatcctggccaacatggtgaaactccatctccactaaaaatacaaaaattatctgggtgtcatggcgcgtggtggtgagcacctatagtcccagctattcgggaggctgaggcaggagaatggcgtgaacctggaaggggagcttgcagtgagccgagattgcgccactgcactccagcctgggcgacagagcaagactccatctcaaaaaaaaaaaaaagtatcttttaaatcaacaccataaatataaaatacttagtttatgtacttagctctcttcactaccatcttttaagttcacgacaatctggagattactactagaatcataggttcataaaaccagaatgaacccaaaagtcatctggcccacactggccttcaaaaccatgtaccagtctgcatcacacggtacttccttctttagctgaacaactacaataattgtattaaatatctatagtatattgagcatatacaaaaatattatgttcttccacataaaagactagattctttaaggtctagaactatgacttagttattcttgtaatctaagcccttgactattgcctggaatccaagagtcattcaatacgtcttcatctgttagttctggttcttgtctctgaggacacacaaaacaagtctacttcttctatatgatggtccttcaaatatgttaagatgtgcgcgtctgggcgtggtggctcatgccggtaatcccagcactttgggaggccaaggcggatggatcacaaagtcaggagatcaagaccaccctggctaacacagtgaaaccccgtgtctactaaaactacaaaaaatcagccaggcatggtggcgggcgcctatagtcctacttgggaagctgagacaggagaatggcatgaacccaggaggccgagcttgcagtgagccgagatcgtgccactgcactccagcctgggtgacagagcgagactccgtctaaaaaaaaaaaaagatgttcacatcccaaatcttttttgtttgtgagctaaacatgcccatttacttcaaccatatttcctcctggaagggagtttctagtccctgcctctttgcagaggcagtctctcactcccatcagccttggtttggtcaacagccttcttaacatttggggctctgactagatggtgtgacttaactattgtgatagccagccttcaggatggtccctgagagactcatcaacttgtgtgcaagccattctatagttccctcccacactgaatagaggtgacctgtgtgaccaataggatttgtgaaagtgacagtatatgacttccaaagctaagttataaaagacatgacacattttatcttattcccttaaataactcattctggaggaagccactcaccatgtcatgaggacactcaaacagacctatggagagactcacatgaacaggaactgaggctttctgccactcatgggagtgagccaccctaaaattggatcctccagctccagccaagcagccccaactaacatcttgactgcaaccccagaccacccagccattcaccaattcctaacctccagaaactgtcagaaatgacaaatgtttattgttgttttaagctaccaagttttggggcaattggttatgtagcaatagatgactaatacagcaaggctagaagaaagagggacttagccctttcttcctgaccctggatatcataagaaacagtagaaagacaaagaaaaatagatcaaactattaatttttaaagtcgtaggttttagaccgggcgcagtggctcatgtctgtaatcccagcactttgggaggctgagatgggcagatcacaaggtcaagagatggagaccatcctggccaacttggtgaaaccctgtctctactaaaaaaaattcaaaaattagccgggcatggtggtgcacacctgtagtcccagttactcaggaggctgaggcaggagaatcgcttgaacccgggaggcggaggttgcagtgagcctagatggcaccactgcactccagtccgggtgacagtgagagattccatctcaaaaaaaaaaagtcataggtttttttctcttctgtgtctgtgtgtaaaatttaagggatatttttaattaagttgtgttatgtctctgttaagtgccatacttaacttagacacttaaaacatggcttttaagacactggttttcacttttaagatctgagaggcacaagcactttcttttggcccctgaatgcatgctgagaaaatctactctttatcctttggaactctcacttgaagtcaatggccttcttacacaccagtgttaagattttctgtagttctttgcacatggtacagggaaaagttggatttaatagttataatcatgttggccttctcacttaattgagattaggaagtacccagcttcatctgggaactcaaaagagaagttgtttctatgttctcccactgccatctccacctacaacacacaaacacacacacacacacacacacacacacacacactggccttactatggtgtttcttccctatttttaattttttcttatatttatgtgattttttttctgaatatgtctactttttgaattcatacttttcaaatttctttcttttctactttattggctagtatatctcaacctcttcttaacctgagtgactcttaggtagaactaaaatgtttttaaaaattctcagctgggcacagtgactcatgcctaaaatcccaacactttgtgaggccaaggcaagagaattgtttgagcccaggagttcaagaccagcctgggcaacatggtgagaccctgtctctacaaaaatacatttttaaattaaccaggtatggtggcatgcacctgtagtcccagctactcaggaggctgaggtgggaggatcacttgagccagggagatcaaggctgcagtgagctgtgattgtgccactgcactcacctgggcaacagagtgagacccagtctccaaaaatgaataaaaataaaataaaataaattctctcaagtcagttaactttaaggtgtcaatatccagggtataaccttgctctcagtgacattaagcacataaagagatacctgaatttgagctttgaggatcatctggtgactctgcacttgatatatttaaagatatcaatgtgtcctttgaagctataatggactatgaggtaatctgaaggtccagaaaactaaatacacgttagttactggacgaataacttagtcttggagaaacaaaatagttttaagtgaacgtcttcagaaatcttgctattatctttttatgctgtagttaatcacaccattggaggatatttggatatgaacatgtaaaggaatgcaatatctttattcagaaaaataaggggaaaaatcaggcaaagaaaaaagtagaaaaaatatttatttatttttattgttattttgagactgagtctcactctattacccaaactggaatgcagtggctccatctcagctcactgcaacctctgcctcctggtttcaagcaattctcgtgcctcagcctcctgagtagctgggattacaggcacctgccaccatggctggctaatttttgtatttttagtagagatgaggtttcaccattttggccaggctggccttgaactcctgacctcaaggcccgcctcggcctcccaaaatgctgggattacagatgtgagccactgtgccggccatatttatatcagtatttacatactgcttaatattttataaaacatgttcatttgcaatgtcacatctgaccctcaccataccccagtgctgtaaacagagagatattcatcccattctataaacttcagagaaaacttaagttaaatgacttactcaggctgggcatggtggctcacacctgtaatcctagcactttgggcagctgaggcaggaggtttgcttgagctcaggagttcaagaacagcctatgcaacatagcgagatcttgtctctactaaaaattcaaataaattaggtaggcgtggtaaggcacagctgtagtcccagttatttggggggctcaggcagaattgcttgagccaggaaagccaagactacagtgagccatgatcatgccactgtagtccagcctgggcaatagagtgaaaatctgtctcaaaaaaaaaattaattaattaattaaattaatttttaaaaatgacttactcagctcagatggcccctaaaagctgaaatacaactaaggtctaagacttctgctgtaggtaaatgtttctactgcaagggagaaaagataaataagaaggaaaaaatataagcaatgagaaaataaagctaactggttttactcagtataattagcaattgttgagtggttattttaaaagtctatatgcttccccaaagattttacaatcccatgatgatatttaagaaactgggcatttctccatcagccaggaaggacattggtgttgaggacaataactaccacggcttccagtgttttgaagaaatttcagatgcatagccttttggccaggtgtctgtgatttcatattgtcagagcatttcttgtaatgctgggggttgcagctctcttaaagtttacattgctgaaccaagaaagcagatatatgtagatttctacagaaactatgattccatgaaagattttgaggaggtgaagagggctggtacctttcagagtgcaaagtgattttggaatgttaagaatgttttgggattgagttcctcagaagtttgtcactgacctatgttcctgaactatgaaacatgaatatgtgggctaaggaatcatttgtactgataaataaacaattaaaaatttaaaaaaagaaactgaggaaactgggttaactcaacaattgtcatccttgttatcatctgtgtaatgcagctaattatagtactcattcataaagttgttgggaggattaaaatgatacaatatatgacaagtactcaacgttagttgttattgagggtgttgttattttaatcaggatggacaaaattctagataaagagtagaagatatgcgttttcatgctgttataatcagccaactataaattctcttccttcagttctttttttctagagaatgaagacaatattcctttctagttgcctccttcacagaaaaaattcaccagaatggattatgttctcagcaccgtcaaagccttgtagaaacacaagaagatcctgcaaccatttttctcttccagtctttctccttgccattctgagcagagccatattgcagtgcagtggaaagggtatatgaatggtcattcattcagacttacatggctgtctggcaatttaagagttcaatggctgaactggaaagaacagccagcatgattttattgttttctgagaatcaaatgaatagttcacactatctatgcacctatcatctaaggaacagacaggttattttgctgaggatgagcatagtcactagcctgtaagaggtttctccacaagaatatgcttcctcaaaatgtacttgcaaggctgttgaggctactactcaccttagacatgatcccactttggctcaaagatcccactctgccagtggttctgttaggtctctataacttcatttctatagcagccctcctgccacccggctgccaactgtgaggacctgttgttcaagggcgtatcacttgagcaggtgagcattcttattagtatcacagagcagctatcattcacaattacagcatgaatgttgactaaatcagagaccattcaaacccacctacaccctgtgacatcagcatgtggttctattctgccctgcctgattttagatgctttaggaatgatgtaacttggcaaagaaatcctaagtcaaaatttttttgatgataatctcagatcaactgagaatgatgccaatcaacccatgaatgtaatgtgtctcacatgtgggattctataattagtgcttactaatagaggtttcttcaagttactgaaatgagtttacaaactttaggtagctcaggaccctaccctcatgtatatgtgagatttcatttttataaatgccactgtcaaagggtcagatgttgctttttattctcgttgctaggatggtcaaaatcaacattttgatggttgtgttgaacagagcagtccagtcagatttaatccagtcatattaggatcatgccattagagaacagttccacaatcttttctaattcctcttttgtttctggatcataattaaaataatataggaacaaccttattaataaagcttgaattagtttgtctgtattgagctggcctttcatttttctgtcatacaaccttaaaagatctctcatgatttatttatttatttattgttttgagacagagtctgtctctgtccccagggctggagtgcagtgacacgatcttggcttactgcaacctccgcctcctgggttcaagcgattatctggcctcagcctcccaagtagctgggattacaggcatgcactaccacaccccgttaattttgtatttttagtagagatggggtttcgccatgttggccaggctggtctcaaactcctgacctcaagtgatctgcccaccttggcctcccaaagtgctgggattacataagtgagccaccgttcccggcctctcttatgatttgttaactattatctttatgttttcctacatgacattaaattatacaatctttgaaattttactatatactttcttttccatgttagtgttaaaacttccccttacagagccgggtgcggtggctcatggctgtaatcctagcaatttgggaggctgaggcaggcagatcacttgaggtcaggagttcgagaccagcctagccaacatggtgaaaccccgcctctactaaaaatataaaaattaggcaggcatggtggtgggtgcctgtaatcccagctactcaggaggctgaggcaggagaattgcttgaacctggaaggcagaggttgcagtgagctgagattgcgccactgcacactcgagcctaggtgacagagactccatttaaagcaaacaaagaaacaacaacaacaacaaaacttccccttccagaaaacttttatcctttcagacttaagctaaagtctgaaaccacaaaactcctagaacaaaaaataggggaaaatttccttgacgttgttattggcaatgattttttttggatgtgataccaaaagtacaggcaatagaaacaaaaataaagaagtagtacactgcatcaaatcaaaaagcttctgcacagcaaagaaaacaagcaacaaatgaaaagaaaacccacagaatagaagaaaatatttagaaaccacgtatcagagaaggggttagtatttaatatagaaaaagaagtcatacaactcaatagtgaaagacaaaaaacctgatttaaagataggcaaaggaccagaatagacattttttcaaagaagatgtaccaatgtccagcaggtatataaaaggtcctcagcattactaatcatcaggtaagtgcaaatcaaaaccacaatgggatatcacttcacacctgttagaatggcaattattaatattttcatccctgagaggtctcagaaataaaaaaaaacaaattaaaaaataaaaattttttaaaatagaatggctattatccaaaagataaaagatgagtgtctgcaagggtatggagaaagggaacccttatacactgttggaggaaatgtaacttggtatagccattatgaaaaacagtacggcagttcctcaaaaaattaaaaatagaactcctatatgatccagcaatcccacttctgggtatgtagtcaaacaaaatgaaatcggtatctcaaagagatatctgcattctcatgtttattgcatgttatgatatcaacttaagtattcatccacagttaatggataaagaaaatttggtatatatatatacatatatatatgtgtatatatgtgtatatgtatgtgtatatatatatgtgtatatatatgtgtatatatatgtgtatatatatatatattcagccattaaaaaaaagaaaattctaccatttgtgacaatgaggacattatgctaagtgaaataagacagacaaagaaagacaaatgctatataatctcacttataggtggaatctaaaaaaattgaactcacagaggcagaaagtagaatagtggtttccaggagctgaggcaggggtttggggtgcagggtaaggggaagagatgggaagatgttggttaagggtacaaactttctgttgaaagattaaagagcactggggtctcggctgggtgcagtggctcatgcctataatcccagcactttggaaggctgaggcaggtggatcatctgaaatcaagagttcaagaccaacctgagcaacatggtgaaaccccatctctactaaaatacaaaaaattagctgggcgtggtggcacacacctgtagtctcagctacttgggaagctgaggtatgagaattgcttgaacccaggaggtggaggccgagatcgcaccactggactccagcttgggctacagagtgagactctgtctcaaaaaaaaaaaaaaaagtactggggtctctaatgtacagcatggtgacaatggttaatactgcattgtatacttgaaatttactgtgagagtagatcttaagtattctcaccacacatggtaactatgtcagataatggatgtgctaattagcttgattgtggtaatcatttcacaatgtgtgtgtgtatatatatatatatatatatatatatatatatatatatatataaaatcatcacacatataccttaaatatatacaatttttatttgtcaattaaatatatacaaattttatttgattaatatctcaaaaagctggggaaaaaaaagacttaggtctgaatccagattccactgcctataaattaagaccttgggcaaattagtcctttatttgtttcttttcttttttcagagacagggtctcactatgttacccaggctggccttgaactcctgagctgaagggatcctcctgccttagcctcccaagtagctaggactacaggcacacaccactgtgcctggcttcaaattacttctttgaatctttgttttctagtctataagatgggcatgatacccttcttaatctttattgtgatagttaaatgtaataacattacaaaatgcttagtagagtgtctggcatggcagacacttgatgaatgatacttattatcgctattattctcatcatctaagatacttcaatttgatgtagtcaaatattctattctacttatctacctctctaagtgagggctactctgtaacatactgctatggaaagatcaggaatctgccctagacatgtataaataagtactttatgcccaaatgagtataaattttacctctggtataatttctatggggagataaaactttaattgccatataggaaaccactggtgaatttgggatgatttgatgtgcttgttttgggttgcttgttgctgttgttgttgttgttgttgtttttagagatgaggtctcactatgttgcccaagatggtctcgaactcctggtcttaagtgagcctcctgccttgccctcccaaagtgctgggattataggtgtgagccatagcacccagcctaagtttttaccattgggaagcaaatgttttgtggagaagccatagttttgaatagcaatttaaagatgaaaaatagatgatagaggtggagaaaggtgtcaatgggaaaccccacatatggtaagataactatgtgtgccatggaccacaaacaggctagcctggtcgaagcaaaaaggttgatcccgaacataatgggatgagggcattagataggtaaggaagtgactgatggaaaatcaagagtgatagctgatgatgaatggtgatactgtatatgattttgtgcattgatataccatttttcctttctttttccatctacatggatctcaaaaatgagcaatcttctctctggaggtggataagacagaacattttgcaagccctttaagtccttcaggaaacacaaacatcctgtgatctgtcactcaggattctgactcagactgggaatctgagcaatgctcatggcaataagccaggaccaggccctaaacatctggctgctccactgtatggatctttggcatgttaaatgtcaacagaccttgtggatataaagttgactcagtcagaaaacatctacggtctacatggaaaagaaagtcttttggaaagaaaagaaggcagggtgtctgaaccctccatcaggatttccctactccactctatttctattagatgagagggatgaggaaagagtactcagccaccttttcaagtcatctggtggtcagggctatttgtaactctaatctcatattcataccagtcgtttctaaatccaatcccatatttacaccaacctgtcttacaaccttaatttggtttcccaggtgtattccagttccactgtcaaatagtaagtactggattatccctagatagactcaccaaaagattatacaagtccttagaggagggaagtgagactgtagaagagactcagcatccaacaaatatatcacataatatattcaaactactctaagtactacaccaaaacaatgactttcctgaccaccatcctaaccatgacaccaaccctgggtaatttcatctcatcatattgcttcaaatattatatatgctttaaataatataggctgatgccatttttatttctactctcactttcttttttctttctttctttttttttttttttttttttttttgagactgagtcttgctctattgcccaggctggagtgatctcggctcactgcaacctctgcctcccgggtttaagcgattctcctgcctcagccagccaagtagctgggattacagggatgtgccacctcacccagctaattttgtatttttagtagagacggggtttcactatgttggtcaggctggtctcgaactcctgacctcaggtgatccacccacctcagcctcccaaagtgctgggattacaggcatgagccaccacgcccaactccaatctcaatttctgttaaattcagatccatatttccaactgctactctacatcaaaaatttcctcttggctattcttatagcacttaaaactcaaaatgtttacaaccaatttatcttttttctgttccattcactctatctacagtctcatctgaaacaacaaaaaactgcttatctttcatctgtaaccactatatttgttaacacaatcatattcaatacagacacctgagctagaaacccaagtccccactgacccatttgtctttctgtacccctgtcctatctaattagtaaccaaggctcattggtgctaccttccaaattactcttgaatttattctctcctctccattcccaccactactgattaatgtgacacttatcatttcaagtctggactttggtactggacactaactgtctctggtttctctctcttccaatcccatcctttacaatgattacaatataatcatttcaattttctgcttagcatccttcaaagaccattcatcttactacagaggccttcatacttcttcacctgccactcacactctttgctttctgccactaagcagcccttcctgcttctgtctcctgcatgcagcttaatgcatatccatcctctgggcctgtgctcactcttgaaactttggcctagaagtctcttctcctgctgttgtttttactctgagcatctcctagaaatagttcaagcctcagtctcagagtccatgatgccagcaggaagaaagaacagatctctcctccatggttccacagttgttgcatgccactatcacacacttacttgaattcattgatggctatggttaggtgagccactgtgcccagcccggggtctagtcatctttgtagccctagtacctaacatatgtaggcactcagtaaataatggtgaattaaactaaattgaattttaatagcaactgtctcctatttccagaagttcctctaacaatatgatgcaggccttatatttaaaagtagccattattctgataagttttatattttgttgacagctaagtacactaagagtcctgtctggataagggtcattctttggccaatttaaatggaattgtgattatattaggcccatattgtttggaatctaactaacttgtctgatctcagaaaaattacaaaaaaaaaagaaaacacaggtaaaaacccctctcaaggacagcaatgacatagttaactttggctaccaatgcaccttctacattcataattattgtcactgatgctttagagcacccagaatagtgaaatagtgtataactgagacctattaaattctaacaggctaagcacagtggcttacacctgtaatcccagtacgttgggaggccagggcagacaggtcacttgaggccaggagtttgagaccaacctggccaacatggtaaaaccccagaaagcaaaaaattagagtatactcaaaaaagtataaaaaattagtcaggcgtggtggtgtatacctgcaatctcagctactcgggaggctgacacatgagaaccacttgaactcaggaggcgaaggttgcaatgagccaaggtttcaccactaaactccagcctgggagacacagccttgctctgtctcaaaaaaaaaaaaaaaaaaaaaatcaaacaggtagcatagagacaaaatctgtgaaaagctaaacactgaattgatataaataaagtgttctactccttatctcaaaatgttaaagtgctatattttccccactcacataaaaaagtaacaatttatgtcattcaaatgataaagaaataactcatttattttattaaatatgaatgtccttaaggaacaagtattatctttaaaaacctgttcagaattggtaattttatatttacatctatcttctgaattatattacctttttaccacttttgtaggttactatgataaattcttgccttaacaacagctattgattttaattattgagataccaatgatctcgtagggggatgccaattattacgaagtatctgtggaagacaatggtgctgtgtatgcatacagaattagggacactgtcttgctcaatcaattttcagtcaatgagctcatcagctaaatctgatggactgacagagaatccaaacagagtaatacaatgactaagacagtagttggtttgcccagagcagtcagatgaggaagggcatcgagccaagtccagagactcagggcagactccaaatgagctctagctaacaacaagacaatatctcttgttttcaaccctgtgtaaattataaaaacaagaggatgtggccattatggtgtgtttcccaaaaactgttcatgtagctgtgatgtgagcagctaaagaattccacaggccgacagtggagggagaaccttagccctaatctcagggccactggatttagaagcatccacagtaaatccagtaacttattagttttcctcatttagccaggaggtctggaaagggaacttgtctcccaccaaaaacaaaatgatactttgattgcaagtctaaatccaggatctgattttggcaagtcgtttaacctctcaatatcttattgtggaaataacagttaaaaaaaaaacaaaaagtcctatctagcttaaataattgtgctaacccaaggacataactggttagagtctttataaactgcagtcctgtatacaggtaaaatagaatggtgaggaagcatccacctagaacactgacattcttctttcaatccttcataaattattgagcatctcctctgccaggttctgctttatatgcttaggaaagcatgtaaacaagatagcttagatctcattcattttgaagcttccactaggcctttgattcatgtgcaaccagcttgcaaaatgctggtcatacacaagttttgggctctgccctcaagcagaggggcatggagaagattatgagacagatgatgatagtaataagatgatgcattgaaatcagtgcaaatccatttcatctccatcccaacctcacccttttactgcaccattgagtttggggtttggtttaggaggtcctggatgtaaattcaccctctctttgaaataataatggccctcttctcatagggtggttgttctcaatgaacccagtagacataaatatcctgcaggagcttccattctagcagggagattcagacgataaacataaacagaagatattatgtagcatatagttggaaagtgatgactgctatgggagaaaaaaatagagcatggaaaagggattgggagtgcagaaggcacagtagcagctttgatattttaaaaagagtgagaaagcggcagctagaaagatctggattctcatttcaggtcaccattcagaaaagctaagtttgctgtacagtaaggctcaggagatctgatcctgattgtagaaacctctgattacagaatcttggattgtatctcccactgtatcctcctagaccatcctgcaagatctataagagtccttttgggaaatccctaggagttcttggaaagaagaaagattgttggttggaataaaaagggttgaatgagttccagaaagccgggttctcaatctcatggacaacaatctgcagaagaagacaacttcaaaaaaccaactagaagcaacatgcagagatgagaggggcctcctcaggaaagaaggcagctggtccacagcagaaaaatcttgaaccacctctctcaggaagatgtggggtcgctctgcagagaacttcttagcttcaggatccgtgaggaagaccagaaagaacaaacagaggactcctggaaacagatatgggggcagtaccagcaaagcacctcagaccccagggaaggaaagagcctgggcagacctcactgttgaaagcgaggacgcatttaagaacagaatggaagttaaagtgaagatgcctgaagaatcgaaaccatggcttgctggggactggaacttagttaccaagcagaagcagctgttttaactccctgctaagcaaaatgtagatgcaattctaaaggagtatgcaaattgtaaaacatcgcagggaaacgtcgataataaggcataggcagttaatgaaattgtgacaagaataaaagaatatttcgacgtgatgttaggcactcagctgctctacaaatttgagaggcccctgtatgcagaaatcctcttggctcaccctgatgctcctgtgtcccaggtttaaggggcacacacctactgaggttatttgtaagaataggagaaatgttggcctatatatcccttgatgagaagagccttgcgttattgttgggccatttgcatgatttcctaaaatatctggcaaagaattctgcatctctttttactggcggtgattacaaagtagcttctgctaagtaccaccacaaagccctgtgctggtctacagaccattcactgttatttccctgagatctggaaacactttttgttcttagtctttttcttgtaaaatggatattctttaacattgttaatgtaaaacagggcttatgtttcagtttgttttctgttctgttttaaacagaaaataaaaggagtgtaagctccttttctcatttcaaagttgctaccagggtatgcagtaattagaacaaagaagaaatattcagtggaacattttattgcctagttgacaacattgcttgaatgctggtggttctacccctttgacactacacaattttctaatatgtgttaatgctacatgacaaaatgccctgactcctagtgccaaacattcaatttgatatatatacccaaaaacccatgcatttgttctcttttttttaatgatgcttgaagtaaaacagcccatcctctgcaaatccgtctatgttgttccttaggcattctgtctttgcgcaaattgttgaagggtggtcgtttgtttcatggtttttgcatttgagtctaatgcatgttgtaacgtgatagaggcaatgcattattgtgtaagccacagttttctgaaaaagttgatattttaggaattacatttcagatcttaaataaaatttgtttctaaatttcaaagcaaaaaagaaaaaagacagtaagaaagtgtctttggaggaaagacctaaaggtgaggaagtaagacgtgtgagcttgtaggggaagagttctcaacagaggggaaggctagagagggccagaccagcaaggaaaacagagggagcaagtaggccagtggttggagtggtcagagacagccatggtggcatcatggagggccttttgttcttggtctgacctgatcagacttctatttcaaaacgatccttctggctgctctgttgagaacagattgtagaggcaagtataggaagaatgaacccagtcatccctatgcagtggtgatggcttggacccgtgcgatagtagttggagtgttaagaagtggtcagtttccagttacatttgaagttaaagccttcaggacttcatgatgggttaaatgtacaggattagagaaagagcaagagaggagtcacagaagattcaaaggatttgggcaagagccaccagaagatggaggtgccagcaacagagacctgagggtaatgcaggaacctggaactcctgtaccttctcttctcctagtttccagggcatcttcctgcaagtgtataaaactgtaggtagaggaacaaagctgatatggtcctatttggtgactgtaggagagactgaccactaagaccatttcatcccttgagacctcagtctccctacttataacatgagataggtcagttacataaggacagaattcctttcttgctgttaaattcaagaacctagatctgcaatcggttctccaatctttcaagccttctttttgattttttttccttgggaaaacatctcaataatgaaatccaatctttaaaaattttggttttaaacaaaattatattgtgatcagcttgagcctaggagttcaaggctacagtgagctatgatcccaccaccacattccatatatatatatatatatatatacacacacatatatagtgatcaaaatatttgatcaaaatatcaaaaaatgtttttaataagtcagcttctctaaaataaaaataagtatgtcttgcaattgtttatacaataccttgttccagggaggtacatggctaatcaggaaacatatttcctatgttgtatttaatcagaaattttgctcacaaggttaaattacagcattcattttgtgccactgtgaaaatattcccttccattttaacaggactaaaaatgcttccaaagctgcctaaaagaatattcagctcctataggttcttgctgcatttttatttcccttggtaacagtacttttgataacattggtggaagaaaagaagtcatagtaaaggatgaagatggagtatctgatactataacactagcctgatgctagaggagaatgtaatacaggctgaatattgaaaatttgcaacttattgagcaccaacatgacatcacaagtggaaaattccacacagaagtacttaaaacatattgcttcatgcaaaaaatcatttaaaatattgtataaaaaacttttaggctatgtacactgaataagctgtatgtgaaatataaatgaattttgtgtttagactagggtcctcttccaagatatctcattatatacatgcaaatgttccaaaaccataaaaaatccaaaatcttcagacacatctggtcccaagcatttctaatgaaggatactcaatctgtataaattatacacaatttaattattttattttatatatatatattttttagatgaagttttgctctatggcccaggctgaagtgcagtggtgcaatctcggctcactgcaacctccacctctcaggttcaagaattctcctgtctcagcctcccaagtagctgcggctacaggcgtgtaccaccacgctggctaatttttgtatttttagtagagatggggtttcactatattggccaggctggtctcgaacttctagcctcaagtaatctgcctgcctcggcctgccaaagtgctaggattattgacatgagccaccacaaccggcctaatttaacctaaatccagaaataatcccttaaattttgtagctcacaaacgcatcctccctctttccccacaacattccatcagactcagggaacgtcatcacacatcaacgtcgtcatagtttgtatactgagtgctaagtatgtgcaaggcgttgtgccaagggatgtcaggcttaactcacttaatgctcacaaccatcctgtgagaagagggtcattattatttccatggtcagagagaaggtggattcacatccaggacctcctaaacccaatcccaaactcagtggtgcagtgaaagggtgaggttgggttggagatgaaatggatttgcactgatttcaatgcatcgtcttattacgatcagtgtttgtctcataatctccatgcccctctgcttgaggacagaggcgacaaaacttgtgtatgactggcattttgcaagctggttacacattaataaaaggcccagtggaagttccaaaacaaatgagatctaagctatcttgttctcacggtttcccaagcccaagtagagcctggcatactataggcacaccatgggtgctccctgagtacatgaacataaagatgatccacaggtgggtgaacaatactgggggcaggtgaaagggaggacctcgaggcaatactgccagagcccctcctgcttagagtgtccaggcttctacatggggagacagcgcaccccccagacactcccgcccactcctttctggctcgctgagtgacgccagtttcaagcctcagcccacgccaggctccaggaccagcagagcgggtctgcgcggacagaggcactgggctgcgcccgtagcgcaccccaccaagaggaaggcgtgcctagtggggaggcggggctccaggggccgggcacacgcagacacactcctgctctctctacgcacgttctcacactctcattcacaccgcactcaccctgtgcacatccccagtttctcgtattcctcacattcacacattcatacactcatatattcacacacacccatgctcccaaacacgcttcactcacacagctccgcgcacagggatcaaagaccacattgggtacagtgtacactgcttgggtgatgggtgcaccaaaatctcagaaatcaccactaaagaacctatccatgtaacctaacaccacctgttcctcaaaaaactattgaaataatttaaaaataaaaaaggaaaagcaatctcattccctaccctcattctaattcacttttcacctcttcacacaccatcacgcccacgtaccttaatctcactgttgacagtacacttatgctcgcgctcatgcacactcgcccccacctcgccttcgctctttacacgagcttgcgcgcagacacactcaaggactccctacccacttacactcacgcatgcgcacaggcgcacacgctaactctgcctcctcactcgcgctcgtgcatgcgcatccgtcgcggagaggactttgtgcctggtgtgggagcgggtgtttggtggcctttgcggatgggcttgttttgaggctgtggggtcagtgcgatcgtttagatttccttggtttcccagtgagaaataagttagccaggaagagagagaggcggagacccagggagaccgagactggaggaagggagtaggttgaggttttagagccgtgggagcaagagcgccgggtaggagctgtcgcgcagagagcacctcgcgcagccccagagcctgtttgtttaccctcttcctcggagcggcttctccagcgtctcatttcttctgcctcccttgccctcgcccaggtgtgggacgcgggcgagtgaggacagacttacaaccgtcctcggccgcgcagcacagggttcccgcgccctgtccctatgccccggggacacagggcaggaggctgaaaaagggactcagcgttagaaactatggttggaattctccccctgccacttgctatgtggccttggccagtttaccgttgtctcggagcctccgtttcctatctgaaataaggaatcattcattcaacaaatattaattgccatcctaatatatgtcacctctggtctggacatttggcatacactggtgaatacataaaacagacccagtttctgcccaggagcagtttgcagtcaacaagcatacggattgattatgaagagggcttttgaattaaataataaaatattgctttcatccactccaaatgtttttcagcgcttactgtgttctgggcacaggtgaataaaaacaatcatgttccctgtcctcattctaatttcagtccgtacattggactggccctcagaacctttaatatgtaggaaaaccaaccacactaaccaacaaatggacagccaacaaataaggaagtaataaaagcacctacctcacagggttgctgtgagaaataaaggaggcattaaagtcttcagccactgccaggcatatagtaggtgttcaataaatgctaggtgttatcaggtggttagtattgcttagtgcctaaaaggctctgccatcactagctgtgtgaccttggttcagtctttgaacttcagtagttcaaatagggttctccgcaaacataatgaggagaaaataatggcattttatctgggagggctgttgtgcggattaatgaggtcatgcaggcaaggctcttggttcaagaactgccacacagtgagagctcagaaaatgtacctacgagtattgtcatatactcgaaaggcgactgttttcctcctatgcaaagcaggtgggtgtgcagcaaagctgggaggtttctaatatcataggaacgttttgaaatttagggcgcagtcccaagtagggacggccaggacgccagagcctttgacgggggtggggagtggcgaggttaatgtaactgctgaacaaacatatgcccggaaaccgagggatagaaaggccccacactgggcgccttcagggtgcgagcgccaggctgtggaggagccttagagggcaacactcggccgggaaaaggcgcggggggacggagagatgattgtgcagcggcttcctggctcctagttgccaagcccagggactctgatacctaatttacaagcttcaagagcctatggagctgcaggtctcagataataataaaaccaacaagagaagccacgagccttaccaggcaccaggcccggtgttaggcagtcctgaattcctcacaaaaactcgaagacgatggcattttctctattttacagatgcagaaactgaaattctttctccactttcctaggcctcctttcagtttttgcaattaaccaagagaaactctcggaggctcccgtgagcacccttaggtggccgggaacgcattccccatccctctttcccaggccaacacccgcacatcttgcaggtctccgtttaaatgtcacttcaagcttcggttttatcatcacccagagccccttgagcttttctttcatattcacacgacctttttaactcaccagctccgagttaatttgttgattcgcttaacctggaaactccccgggggcgggtcttgtgctactgaattcccttgcgcgcagcctggggtataataggcgctcaatacacactttccaactatcaaatgaccagataaggctcaaaaaagttacgttgctctcttcagattccatggtaggagggcgtagggggcaggatttatcagttatttctcaactacatcagaaccgcatgcagaattctggttgacttctgtctccccctccatctacaccccgccgtgttccagcctcacatcattaaatcgaaatcccttaggtaatcagtatttttataaagctctccaggtgatttttgtagatgaccaagatcaaaaaccagaagggctgggctgctaaaaattataaagaattgctcttattttagtgacttttttttttttaagtctttgctcccataactaagcagctattttggctccaagctttcagaaaatttaggccaagggaagtggggaattggtatgcatgtgaataattcaaccctcctcttacacactcctgcctcccccgcccgccctccaatacaaaaaccacatctctgaatagggtagtaaaaaatagtaagtgccaggagaactggagagggagggagggaggtgaagcatttgcttcaattatccggataattgttccccacctcaggccattgttactgaaatgaaacaatattctattggatactgtcttggccttttcaggcctgctccctgcagtgcctagcacacgctgggcacagagtaggcgctcgataaattttattctgatgacagaggagagctctgagggtgggagagggatgccttgttcggcttgaggatttgggggtgggcgaatattaattaaagtgaagtggggagcagaggggctgtgtggcaggcattcagtgccatcacaacttttttccaactgggccgttcctgaaattctaagccaaacccctcacttatttctcagaagacctccactaccaccccccacccccctctccccgctgcttcttctcagagggccgaattgaactcttgcaactgtggtgagcacaaaggcgaattcaggtttctcaaaagcccatccgttctgaataaacaccagggagaagcaagattatttttggtggtgcatgaacacagggcccacagcctgccctccctctagaaaggccttccctggccttgcattaaaactaacaatattggggcagctgaaggaatagcctggctcctgagccccccatcactcaagcagtacaagaatgtggggactagctcccaactgccctctttcatcttgacccacagcttttcaagaggagcttgagttctctatgagtgtgtatttgctaattgcagccggggctttaatgagattcttttaactcccccaagctcgtttgcaggttatagccttatctggggacccacgttttccaccctggctacacatcctgtgaacaattgcctctccagagcctgaaaggagagcgagcgccccatttctgctgaatacacttctcagttcatccaaggctggcgggcttttgatggccacaatgcaagttacgcccaaagagtgtctctttggtcagatcgacaacgcttggcttcacgtttgcaagttaaacgggcagaaacccggctgaaactcccacgccagacgccagggacgtttccctccgccctgctcagagcaaaactggggaatgggtctgggcggggggaggaaagaaaggaggggtagttgtgagcagagggtgggggagaagagagtccttattctcaacagccatctagaagaagaaaggggggggggcattttctctggcatttcttatttttattttttccattttgctttgttggcagctttacccaaacaaaaaataaaataaaatgagagcattttcttcttgtcttcacctaggtagctgctttcctccagcccctgaaaatgtgactccttcataaaatcaaaatttatgattattcaaatgttggggactgtgaaaagagaggaagaaagagagaaaattaatattgcagctgttcttctgattaatgagagataattgctcatgaaaagtcacccctgtggcattttgttgtctcctggatctttgttcttttccactattattgaggactttcttgaagactaagcggttcttttcaatttttgggtattcagaaagggttgcctggttacagagaatggggaaatctcgggctatatcgggtaagatgtgccacagacagcaatatcacaatgccactcggagaaaaggatggatacaagttaacgatgcactttcaataaaacattcatagacttgttcacgctttgataatgacctcattaaagggagctgggggcaagtaagtcctgtctcctgtttgtgttcggctaacaaaacccagctttgagatcattcatcgctttggaaactaatatgaaatcaatgtaagaggagcaaataaatccgaggcggccccgccaactccccggctgtcccgccctgcctgcagcctccatttggagctggagaaccatgtgggcaaatgctgaaactaagagaaaaaaggactggggatgaaagtggtggtgggggaggtggggaggtttggaggacacagagggaggggcaaagtgggagttacagcctgaaaaaaacagctaagcacaggaacgggtcagaactctggggcctgttgaataagcaatgctaagtccctgccctttacttgtcctgactttgcccatgaaagcaaacaggaagaaagagaagtgagacaggaatgtggggttcaggtcaggtgccattccagagctgggaagaagtactggagaccttttggaagctagaactgagaatccaaatctcagggttgggctgaaaggaaactgctcacccaggctcaacttggagaatcgagagacaagaaggccatgcctctgctgttctttctagaatagctttgattttttttttgtaagttgagggtaagggtggagtgccttggccaggaggaggtacaaagaacaattttgttaccatcacatatgtgacactgtcttgcactcaaggaagacaaaaccatactctattgtcccaagcaagagggagataataaaaagatttcccctttcctttaaaagaactaattttctccttgaattatgaaagtaatggcttaggtaacagcctgtactctgtacccgactgcttaatacagaataaatccttccacgtggctcctggagttgtggcaattagagctcattataggctcataagagctctcattttggggattacttaatggacgatgaaattttatcggacagaatcactgagaaataaaattgtgtggcggctcagacaccatgggcacacgccaatggtctgtctgttccctctcaggaaaagaaagctgaacttggggtctcctgctggttcagggcactgcactctggggaacagtagggctgggcagggctggggtggggggtgggcagtgctgccccgggggcatggagggtaggcttcctttgaggaggggataggcaggtagggccagataggggctggactcagaagagaaggagggagagagactggcagacactgagagatccaaagagaactagagaagtgagtcagagtggacagaaactgtgcaagaaatgggattccagtatacttgctcttggtgggctgaaggaattaaccaagtaccctaagggtcaagtttttcagacatggtcttgctttcagcctcagcctggtctgaaaccactgctccccttgaagtctttaggaaaccccatgagcccctcacatttctcaaaactccttggcactgaaaaatgaaagtttccacagtcagacacaaattgaataagatgcacaagcctcttgcatagttaagattctctaaggtaaaatggtctgcacatgggtgcgatttctaggactttagcataggagctcttcctctgaacacatcccaaactgctgggaacattgtgactcaaaccatcagcccaaaacagactgtggataacctgggacctaacccagaggaggaaaagagagaaagctattattcttaaagagtatctgtatctatatctatatatgcttgtatagttgcaaagtgaatggggggaatcgagtcatctatttggacagtttaggactgtaaaaaatatcctgccattcagcagggtatgttttttattgccattctccatcagtggctccaagccttcttcttggggctgaaatgatttcggggattgcctagatcctccagtcatgaacaagggcgggctggggtgagcctgagcgtctgcagaccttgtggtacaaaagtagttacagctgagctgccccatgttaagccctgagactccttaattgttgtcacaagatgttggattagcacatttctggaatagctgtctgtttacactccagagacccaccgtccactaaccgctttctaattgaattctaatcacattcaaatagctcaataaccagcctcagctgcaattcataaaactttaattgccatccataaatcctgggctccccagagccgggcatccctacaacccaattacacttctctagcaggcaagagagactgtcacagagatggagaggggaagacagaggatggaaagatagagccgtgcctctagctagtgctctcctggatttgggcaccttgttctctcaggtggagggagtcctgtctctaagtttcttagcaccatcatgaactcaggattgaagttagctgctctggaaaaaggatcagacttctaactattgcccaaccacatggccccagcccgcttttctgcagggggaaatgaagagagaaaatggccacctctgctgccttgccttctccgaagataaatagtcccaatagtttggcagccaccctctctcgggcagtaaggggtgtgcaagacttccatggaccagagagagttcccttacaaagccacttctgccaatcagaggcaagattccctggatggctgaatcctcttcatcctttttaggttcttaagatgcagaggaaagagtgcttcctggttagccttgctaagctgcccatgattggtaaaaatgagggacaggaaatcctcagacccagagcgaaggtctatctaatccctgctgcgtctttaggagggcttggtgtttgaggtcctccctccaaaatcttcaggatggagtttgtaggattgccctggaatgccatggtgttactacttggagaaagaaaagggtgactcttcaacatctctctctctctgcggaagtgggaggtgccgatcagaaagggaaacaaggaagggtcgttggtctgagtggccccaggagggccccaagtacaaagacacttcagaccttgtcgaacatcagcatgaaaagcttgacggtttcttagctgggaggcctcacagttctgcgccggacagtcctgaactaaccacctgaatgacctctgccaagtccaaaagctgtggacaggggtaggtgtaaccgtggccagagctgcgctcagggactggacgactgccagtccgtcgcccgcacaatcctgctccaaaccgcaggcctcacacttcaccgcgccgcagccacccctaccacagaggagctggaaacactgagcattcctattaaataagcctccaagtccccacctggtacgctttgcggtggggcgtggggaagagttgggctgcggccagggtagcgagagggggtgggatggaggatgcagcgctgtgatttctcagtaaagcgtggagaaagagggggaggaggccggcctccccgggaaattaacaaaacctacactttgcaaagtctcccccatccccctcccccgagttcttccccgccgcgcgcccgcccctcctcgcggcttctgttgtgactcgggcagcctatcccgagggtgcggagctgccgaggagcctgagccgagcggtactccgcagcatcacgtgccagggtggggggctataaaatacccgagccggggcgccgggcgggggacgtgaggaccagccctctccggggacccctttgttcccagcccagacgccaacacctctgcgtccccaagggcttgactgcccgtgtctgcgcggctcccagggcagagcttagaacactagaggagaggggtcgccgcgaactgccggggcttccagccacccacccctctcgacatgtcgcgctccttctatgtcgactcgctcatcatcaaggacacctcacggcctgcgccctcgctgcctgaaccgcaccccgggccggatttcttcatcccgcttggcatgccgcccccattggtgatgtccgtgtccggccccggctgcccgtcccgcaagagcggcgcgttctgcgtgtgccctctctgcgtcacttcgcacctgcactcctctcgggggtctgtgggcgccggcagcgggggcgcaggggccggggttaccggggccggaggcagtggggtggcaggggccgcaggggcactgcctctgcttaagggccagttctcttcggctcctggggacgcgcagttttgcccgcgggtgaaccatgcgcatcatcaccaccacccgccgcagcaccaccatcaccatcatcagccccagcagcctggctcggccgcggcggcggcagcagcagcagcggcggcggcggccgcggcggccttggggcacccgcagcaccacgcacctgtctgcaccgccaccacctacaacgtggcggacccgcggagattccactgcctcaccatgggtagggcggggtcttggggcacctgcgctccgcgcctttcgcgctcctggagcaaactttccacctccagtggaggaagtgggagcccggggacagggtgaagagagaggacgggcttttagtgtaaccgtagagtcagccacagaagttccacgaaagtggaagttagtttgccagcttctccactcagcctggtgcgttttactcctagtagtaggtgctcgagtattgccttattaatactggggccttagggacctcgaacgtcacggcggataaaccagaggttaactgcttgggatttggggtgggtgtgtttgaacctgtgtggcatccccgcgtcggggcggctaaagcgtcttgacgtttttggctaagcctgcgcgcttctccgcttggctcaaagggaggcgatcagatagtgcaagcccccatccctctttaatcctgtgacttcgcatcctgcgcatcgaagacctttatttgctttgcacgtctcttttcttccccgctaagcaaccacgtgccttgaaatgggaaagggatacagatgttcggctgggcttccccgggtgggtccctgaaatgcgtcctggttagcacatggggtgggagcaccttgcccgagccttacctctctaccctctcttcgccggtccgcaggaggctctgacgccagccaggtacccaatggcaagaggatgaggacggcgttcactagcacgcaactcctggagctggagagagaattc

SEQ ID NO: 98 - DNA, 171732 bp, Homo sapiens
gaattctccccctgccacttgctatgtggccttggccagtttaccgttgtctcggagcctccgtttcctatctgaaataaggaatcattcattcaacaaatattaattgccatcctaatatatgtcacctctggtctggacatttggcatacactggtgaatacataaaacagacccagtttctgcccaggagcagtttgcagtcaacaagcatacggattgattatgaagagggcttttgaattaaataataaaatattgctttcatccactccaaatgtttttcagcgcttactgtgttctgggcacaggtgaataaaaacaatcatgttccctgtcctcattctaatttcagtccgtacattggactggccctcagaacctttaatatgtaggaaaaccaaccacactaaccaacaaatggacagccaacaaataaggaagtaataaaagcacctacctcacagggttgctgtgagaaataaaggaggcattaaagtcttcagccactgccaggcatatagtaggtgttcaataaatgctaggtgttatcaggtggttagtattgcttagtgcctaaaaggctctgccatcactagctgtgtgaccttggttcagtctttgaacttcagtagttcaaatagggttctccgcaaacataatgaggagaaaataatggcattttatctgggagggctgttgtgcggattaatgaggtcatgcaggcaaggctcttggttcaagaactgccacacagtgagagctcagaaaatgtacctacgagtattgtcatatactcgaaaggcgactgttttcctcctatgcaaagcaggtgggtgtgcagcaaagctgggaggtttctaatatcataggaacgttttgaaatttagggcgcagtcccaagtagggacggccaggacgccagagcctttgacgggggtggggagtggcgaggttaatgtaactgctgaacaaacatatgcccggaaaccgagggatagaaaggccccacactgggcgccttcagggtgcgagcgccaggctgtggaggagccttagagggcaacactcggccgggaaaaggcgcggggggacggagagatgattgtgcagcggcttcctggctcctagttgccaagcccagggactctgatacctaatttacaagcttcaagagcctatggagctgcaggtctcagataataataaaaccaacaagagaagccacgagccttaccaggcaccaggcccggtgttaggcagtcctgaattcctcacaaaaactcgaagacgatggcattttctctattttacagatgcagaaactgaaattctttctccactttcctaggcctcctttcagtttttgcaattaaccaagagaaactctcggaggctcccgtgagcacccttaggtggccgggaacgcattccccatccctctttcccaggccaacacccgcacatcttgcaggtctccgtttaaatgtcacttcaagcttcggttttatcatcacccagagccccttgagcttttctttcatattcacacgacctttttaactcaccagctccgagttaatttgttgattcgcttaacctggaaactccccgggggcgggtcttgtgctactgaattcccttgcgcgcagcctggggtataataggcgctcaatacacactttccaactatcaaatgaccagataaggctcaaaaaagttacgttgctctcttcagattccatggtaggagggcgtagggggcaggatttatcagttatttctcaactacatcagaaccgcatgcagaattctggttgacttctgtctccccctccatctacaccccgccgtgttccagcctcacatcattaaatcgaaatcccttaggtaatcagtatttttataaagctctccaggtgatttttgtagatgaccaagatcaaaaaccagaagggctgggctgctaaaaattataaagaattgctcttattttagtgacttttttttttttaagtctttgctcccataactaagcagctattttggctccaagctttcagaaaatttaggccaagggaagtggggaattggtatgcatgtgaataattcaaccctcctcttacacactcctgcctcccccgcccgccctccaatacaaaaaccacatctctgaatagggtagtaaaaaatagtaagtgccaggagaactggagagggagggagggaggtgaagcatttgcttcaattatccggataattgttccccacctcaggccattgttactgaaatgaaacaatattctattggatactgtcttggccttttcaggcctgctccctgcagtgcctagcacacgctgggcacagagtaggcgctcgataaattttattctgatgacagaggagagctctgagggtgggagagggatgccttgttcggcttgaggatttgggggtgggcgaatattaattaaagtgaagtggggagcagaggggctgtgtggcaggcattcagtgccatcacaacttttttccaactgggccgttcctgaaattctaagccaaacccctcacttatttctcagaagacctccactaccaccccccacccccctctccccgctgcttcttctcagagggccgaattgaactcttgcaactgtggtgagcacaaaggcgaattcaggtttctcaaaagcccatccgttctgaataaacaccagggagaagcaagattatttttggtggtgcatgaacacagggcccacagcctgccctccctctagaaaggccttccctggccttgcattaaaactaacaatattggggcagctgaaggaatagcctggctcctgagccccccatcactcaagcagtacaagaatgtggggactagctcccaactgccctctttcatcttgacccacagcttttcaagaggagcttgagttctctatgagtgtgtatttgctaattgcagccggggctttaatgagattcttttaactcccccaagctcgtttgcaggttatagccttatctggggacccacgttttccaccctggctacacatcctgtgaacaattgcctctccagagcctgaaaggagagcgagcgccccatttctgctgaatacacttctcagttcatccaaggctggcgggcttttgatggccacaatgcaagttacgcccaaagagtgtctctttggtcagatcgacaacgcttggcttcacgtttgcaagttaaacgggcagaaacccggctgaaactcccacgccagacgccagggacgtttccctccgccctgctcagagcaaaactggggaatgggtctgggcggggggaggaaagaaaggaggggtagttgtgagcagagggtgggggagaagagagtccttattctcaacagccatctagaagaagaaaggggggggggcattttctctggcatttcttatttttattttttccattttgctttgttggcagctttacccaaacaaaaaataaaataaaatgagagcattttcttcttgtcttcacctaggtagctgctttcctccagcccctgaaaatgtgactccttcataaaatcaaaatttatgattattcaaatgttggggactgtgaaaagagaggaagaaagagagaaaattaatattgcagctgttcttctgattaatgagagataattgctcatgaaaagtcacccctgtggcattttgttgtctcctggatctttgttcttttccactattattgaggactttcttgaagactaagcggttcttttcaatttttgggtattcagaaagggttgcctggttacagagaatggggaaatctcgggctatatcgggtaagatgtgccacagacagcaatatcacaatgccactcggagaaaaggatggatacaagttaacgatgcactttcaataaaacattcatagacttgttcacgctttgataatgacctcattaaagggagctgggggcaagtaagtcctgtctcctgtttgtgttcggctaacaaaacccagctttgagatcattcatcgctttggaaactaatatgaaatcaatgtaagaggagcaaataaatccgaggcggccccgccaactccccggctgtcccgccctgcctgcagcctccatttggagctggagaaccatgtgggcaaatgctgaaactaagagaaaaaaggactggggatgaaagtggtggtgggggaggtggggaggtttggaggacacagagggaggggcaaagtgggagttacagcctgaaaaaaacagctaagcacaggaacgggtcagaactctggggcctgttgaataagcaatgctaagtccctgccctttacttgtcctgactttgcccatgaaagcaaacaggaagaaagagaagtgagacaggaatgtggggttcaggtcaggtgccattccagagctgggaagaagtactggagaccttttggaagctagaactgagaatccaaatctcagggttgggctgaaaggaaactgctcacccaggctcaacttggagaatcgagagacaagaaggccatgcctctgctgttctttctagaatagctttgattttttttttgtaagttgagggtaagggtggagtgccttggccaggaggaggtacaaagaacaattttgttaccatcacatatgtgacactgtcttgcactcaaggaagacaaaaccatactctattgtcccaagcaagagggagataataaaaagatttcccctttcctttaaaagaactaattttctccttgaattatgaaagtaatggcttaggtaacagcctgtactctgtacccgactgcttaatacagaataaatccttccacgtggctcctggagttgtggcaattagagctcattataggctcataagagctctcattttggggattacttaatggacgatgaaattttatcggacagaatcactgagaaataaaattgtgtggcggctcagacaccatgggcacacgccaatggtctgtctgttccctctcaggaaaagaaagctgaacttggggtctcctgctggttcagggcactgcactctggggaacagtagggctgggcagggctggggtggggggtgggcagtgctgccccgggggcatggagggtaggcttcctttgaggaggggataggcaggtagggccagataggggctggactcagaagagaaggagggagagagactggcagacactgagagatccaaagagaactagagaagtgagtcagagtggacagaaactgtgcaagaaatgggattccagtatacttgctcttggtgggctgaaggaattaaccaagtaccctaagggtcaagtttttcagacatggtcttgctttcagcctcagcctggtctgaaaccactgctccccttgaagtctttaggaaaccccatgagcccctcacatttctcaaaactccttggcactgaaaaatgaaagtttccacagtcagacacaaattgaataagatgcacaagcctcttgcatagttaagattctctaaggtaaaatggtctgcacatgggtgcgatttctaggactttagcataggagctcttcctctgaacacatcccaaactgctgggaacattgtgactcaaaccatcagcccaaaacagactgtggataacctgggacctaacccagaggaggaaaagagagaaagctattattcttaaagagtatctgtatctatatctatatatgcttgtatagttgcaaagtgaatggggggaatcgagtcatctatttggacagtttaggactgtaaaaaatatcctgccattcagcagggtatgttttttattgccattctccatcagtggctccaagccttcttcttggggctgaaatgatttcggggattgcctagatcctccagtcatgaacaagggcgggctggggtgagcctgagcgtctgcagaccttgtggtacaaaagtagttacagctgagctgccccatgttaagccctgagactccttaattgttgtcacaagatgttggattagcacatttctggaatagctgtctgtttacactccagagacccaccgtccactaaccgctttctaattgaattctaatcacattcaaatagctcaataaccagcctcagctgcaattcataaaactttaattgccatccataaatcctgggctccccagagccgggcatccctacaacccaattacacttctctagcaggcaagagagactgtcacagagatggagaggggaagacagaggatggaaagatagagccgtgcctctagctagtgctctcctggatttgggcaccttgttctctcaggtggagggagtcctgtctctaagtttcttagcaccatcatgaactcaggattgaagttagctgctctggaaaaaggatcagacttctaactattgcccaaccacatggccccagcccgcttttctgcagggggaaatgaagagagaaaatggccacctctgctgccttgccttctccgaagataaatagtcccaatagtttggcagccaccctctctcgggcagtaaggggtgtgcaagacttccatggaccagagagagttcccttacaaagccacttctgccaatcagaggcaagattccctggatggctgaatcctcttcatcctttttaggttcttaagatgcagaggaaagagtgcttcctggttagccttgctaagctgcccatgattggtaaaaatgagggacaggaaatcctcagacccagagcgaaggtctatctaatccctgctgcgtctttaggagggcttggtgtttgaggtcctccctccaaaatcttcaggatggagtttgtaggattgccctggaatgccatggtgttactacttggagaaagaaaagggtgactcttcaacatctctctctctctgcggaagtgggaggtgccgatcagaaagggaaacaaggaagggtcgttggtctgagtggccccaggagggccccaagtacaaagacacttcagaccttgtcgaacatcagcatgaaaagcttgacggtttcttagctgggaggcctcacagttctgcgccggacagtcctgaactaaccacctgaatgacctctgccaagtccaaaagctgtggacaggggtaggtgtaaccgtggccagagctgcgctcagggactggacgactgccagtccgtcgcccgcacaatcctgctccaaaccgcaggcctcacacttcaccgcgccgcagccacccctaccacagaggagctggaaacactgagcattcctattaaataagcctccaagtccccacctggtacgctttgcggtggggcgtggggaagagttgggctgcggccagggtagcgagagggggtgggatggaggatgcagcgctgtgatttctcagtaaagcgtggagaaagagggggaggaggccggcctccccgggaaattaacaaaacctacactttgcaaagtctcccccatccccctcccccgagttcttccccgccgcgcgcccgcccctcctcgcggcttctgttgtgactcgggcagcctatcccgagggtgcggagctgccgaggagcctgagccgagcggtactccgcagcatcacgtgccagggtggggggctataaaatacccgagccggggcgccgggcgggggacgtgaggaccagccctctccggggacccctttgttcccagcccagacgccaacacctctgcgtccccaagggcttgactgcccgtgtctgcgcggctcccagggcagagcttagaacactagaggagaggggtcgccgcgaactgccggggcttccagccacccacccctctcgacatgtcgcgctccttctatgtcgactcgctcatcatcaaggacacctcacggcctgcgccctcgctgcctgaaccgcaccccgggccggatttcttcatcccgcttggcatgccgcccccattggtgatgtccgtgtccggccccggctgcccgtcccgcaagagcggcgcgttctgcgtgtgccctctctgcgtcacttcgcacctgcactcctctcgggggtctgtgggcgccggcagcgggggcgcaggggccggggttaccggggccggaggcagtggggtggcaggggccgcaggggcactgcctctgcttaagggccagttctcttcggctcctggggacgcgcagttttgcccgcgggtgaaccatgcgcatcatcaccaccacccgccgcagcaccaccatcaccatcatcagccccagcagcctggctcggccgcggcggcggcagcagcagcagcggcggcggcggccgcggcggccttggggcacccgcagcaccacgcacctgtctgcaccgccaccacctacaacgtggcggacccgcggagattccactgcctcaccatgggtagggcggggtcttggggcacctgcgctccgcgcctttcgcgctcctggagcaaactttccacctccagtggaggaagtgggagcccggggacagggtgaagagagaggacgggcttttagtgtaaccgtagagtcagccacagaagttccacgaaagtggaagttagtttgccagcttctccactcagcctggtgcgttttactcctagtagtaggtgctcgagtattgccttattaatactggggccttagggacctcgaacgtcacggcggataaaccagaggttaactgcttgggatttggggtgggtgtgtttgaacctgtgtggcatccccgcgtcggggcggctaaagcgtcttgacgtttttggctaagcctgcgcgcttctccgcttggctcaaagggaggcgatcagatagtgcaagcccccatccctctttaatcctgtgacttcgcatcctgcgcatcgaagacctttatttgctttgcacgtctcttttcttccccgctaagcaaccacgtgccttgaaatgggaaagggatacagatgttcggctgggcttccccgggtgggtccctgaaatgcgtcctggttagcacatggggtgggagcaccttgcccgagccttacctctctaccctctcttcgccggtccgcaggaggctctgacgccagccaggtacccaatggcaagaggatgaggacggcgttcactagcacgcaactcctggagctggagagagaattctcttccaacatgtacctgtctcgactccggaggattgaaatcgccacttacctgaacctgtcggagaagcaggtgaaaatctggtttcagaaccgccgagtgaagcacaagaaggaggggaagggcacgcagaggaacagtcacgcgggctgcaagtgcgtcgggagccaggtgcactacgcgcgctccgaggatgaggactccctgtcgccggcctcagccaacgatgacaaggagatttcccccttatgagggagggcctcctccctcacatcccccgctcctggcagaccaggcaacgccaaggcgtggggcacccaggggccagaatccttgctcattgcagtggtcccatctggagaagaaacgaacctggaagttctggaatggacaagccgggacctgacccttcgcgtctccttcttgacctgtttatctaggactccaacttgaagttacagatttttttaaaaaatgtaaataacctataattcaactcattcttgtcgtataacagaggaaaaacagggttggtttaagtttaacactgtatggggtttttgaaagcacatgtcagttccccatccctactctctttcagaactcgataagaacacaggatttattgattattttctgttgtcgttttcaaacaaaaacacccaagttgaaaataatttagaaaattagaccttgtaggtcttgctttctgaaatttcgcctggggagaatttaaaatctaagtcgctggaagtccctttgtatgtgaataggtttatataaaatttatatttatatttatttaaataaatgaaacaaaaaccagaattttaaatctgtggtgtttgctctccctatcttctcctgccccctcctccaatgtctagagaaaggcatatgcaggaaaaagctgtctgaggaattcgaggaaaatgttgagtaagaacttggtaatgtgggtctcttgactgagggagtttgtggctcaatgggttttctatgtaacagaactttcgccaaggagacacctttagtcatgatggcatctaccaggcagtgcctctccatccttaaaataggcaacctcctcacagttgataggacaaatcactccatttggaatgacactgaccattaacgacaggtaaacctttatttagcaaggaagggtaaaaatcccccatctagtttttgttttcttctttctacttcctcatttctctcagtacgaaaacttgaattatgtgaaggaatttgtagagtcagaatagttttaggaagagcaacaatccatcaaacaggtcagaagcaaacagtggaaacttaataacgatgctacaagcagaattagcgggtttccctcaatgttaagaaaacaaaaagtcagggacaggaagtattctgttcaaagatttataatctcactttttcaaagcagcccagagatgcctttagagctttgagttttggggctttttttcccggtcaccctaatattcagttaatttggctcccttctagtcccttccagcccaccccccttcccatagcctagcagaatcacttcctttaagcctggtcccagagaagacttatttctagctcttccctcagcagggcaactggctctctcctcagtgcggcctgggcttgttatcttagggagagaagtgaagaaactggaaacaggaaaacgaagagatctcattccctgcaagctgagccccactaatcctcaaccggtgtgatttctgattaggttctataaagacgccacccaataggttcaagccacaggagttaatgacaacacacatacacaagggctttaggtctgagttactagaggccggtcggactgaacctcaccaggtacggctggggttctaaaactggacacggttttccctgagtgttgtctttagcgcgcgcgcgcgcgcgcacacacacacacacacacacacacacacacacacacacacacagtaggctcagaaggaaaatccctcttcgttccgtcaagggacatagggaggagggcccgcactgtgtgaggctgaaaagggagctgccggcgctttgtgcaatgtgctgagctctgtcctgcgcagaggtcccagacagccggctcactactgcctggcctgggaagctcaggcctctggatctctttcctcctgtctctcacgcgcagagctccgggctcttcgccctgcccgccacgaaagggaggaggcgcaggccggctgcctttccaaaagattctgtctcccttcttcccaagaagcaggcctctccgcgcgcgagaacagaggtgggaggacgggagtttgcaggcgcaaagaacaggagtttaagcagactatttccaccaggggaaataagaagcacaaagagcgcctgctgcagctctttgcgctcttgcccaaagctaagcttcctctgggctgtggggagactcctctggtccccgttccatctacccagcccggcccctctggggctcagcgcttgggtttagccctcccctatgtccatgactagccccgatcacagtctcttaagcctctcccggcccccggctcccaggccctgcggagccaagcacttggaacaccaggtaccgcgcgcggtggacccagctctgccatgccgcagatagccgcagtgccaaccctgtttagatggtttggatctgcttggatggccccagcccctcttgcttcgatctttggggaagttccctagggaaaggagaataaacaaagtatttctgcccagaggcaaaaaaaaaaaaaaaaaaaaaaaaaaaaaagcgtagcgatacctatttagatgttgggacactctccatagaagaaaaggttctccagggttcccagggaggtcttccttctaggacatccgatgcaaagtggactcctttggtcactttcagaatggagtatgaggtctcctactatgctagaataagttttacatgtttccctatccccactcctcaaaaaatatcagttgatgtttttgaagttttcaaatcggaataatgctttggtattttggagtcggtctgattctaaagaccaacagtttcactttagtttaagagcatttaagccaaccctcagaaactcacattctcagctaaataatcttgatatcaaacacccatttaagaggaaagtttaagatgtatggggtcacccttgacaatttctctacctgggaagcactagatactagtttccattatgccccaattgaaaaacagaaacagaactatgttcccccagagcatgacctcttagagaggtcatggaaagaaagaaagaatggaaagaaagagaatgaaaatgagaatgagaattagaaaacaggaacttgctccaccaagagaaaatcagtgggtagcacccgctgtgagtgtggttgagtccatctttttgagaacaagtctcatgttagttttaaacaggaaaagagctgggggtggaaggcagagtggagagcaggaaggatgacctctcacccatgtgccctggcccagcccagacattcagagcatagaggaggaacagagacttttccccttcactctcccactcagccaccaacaaatgcctaaggccaagggcctgatactgatagcaaactaggccaaaagcaaaagtgacccagtagcccatccttagggtgtcagtgggcctgcatgatggagacactggtgcccatagacctcttttcctctagggtccttattctgaagtggtcatcatagctcagtcccttccccactcccctaaagaatatctaataattttaggagagacaaaacacttggggatgtgaagtctttgatttctgacctccgcctccgtctcctcattgccaaccaccaccccgctaacccacaacgccccaccagttctgtccagttatatctggtcaggattagaaatgcagtttgcttggcacactctaactgtggtcagacaattgccagaaaggtggtggttctaactaaaagcagtcacagagggcaacaggggctttgtatgtacatgtgtgtagtgtgtgcatgcatgaggcacatgtgtgtgtgaaagagacagagagggtcctttgatggtggtgatgtaggtggaaaagagtaatttttaaccaggttttctttttctttttgtttcccacttatacctttcctgcaggttccactcgcttttaatggcactccttgagagatttctttgagggagatggggaggtgctcagtgttgggttgtggggaggaaaaacagtctgaacatggaggggagacatggagaagagctctggggcatgatctcaagcccagccttacgggtgtgagagaggggaggagaatgacactccaatagaacctatttgctagaggaaatcaagtttaaaggagcaatcactcctttcaaaagagctcctcccatcttctccaaacacagcccaaagctgtcctagacgatgaatgcagttcagtgcatcaaagcaattgttcctattttcattattcacaggaaatctttgaatgtacctgttaaggtgacagaccttttaaaagggaacatttttttccatgcaattaaatggtgcatttactaggcgtctattaacataatttaatataaatctattttataaatctttaggctcacattactgaaaattgagcttctcttaaaaaatgcccacatctcttccctaaactacatagaatagaacccaaaaacttgctattctaagccagctagaaatattaaaagtaatagaatcctttgtattgtcttttgttaatggtgggggtatgaagaaaaggggcaacttgtctcatagaaattctataaggacccgaggcttctacatccaacatctggcacttggagtgggcaacacaggctggaactaagggaggggccaaagaagcacagaacttaagacatctcttagaatcagacttgaatcagaactcagattaaaaaaaaaaaaaaactaaaaaaaaagaaagtcagcaaaactccaacttgcaaagaaatttggattccagtttcttctgtttggggaaaaaaattctgaggcctgtgagacctctagtgctgctccatgtggcaatagataaccttgtctgttgccatagccagactacttattctcaagtgtaccctccaaaatcctgggcatcccattgtctctgaaaatagtgttttgtgctctcttaatatactgatgtcaatgccgcccttcggtactggacactgcttttcttcaagctgagccctatgttttcctgaacccttgctgtatctttgttgagccttctaaatcccaaacccaggaaggccccaggggctcccctgagtgaatcctaacagatcggaagtgtatgctgtgtgcttaggaaagtaactagtttcagattaatgaagcagtgacaatttcaatctgcttaaaggcggaggttggcactgcccaggcctgagcgtggggagctcgccaggctgggctttatattgtccccttttctgaagagcagacaaagatggatagagagacattgaaaagcaaggggagtatttcaaacagtctcataaagcaggctgtcactttaagacaagaaccatagtgctttgatgactttgtattagctgcaccatttcaaataggggactcaagtctctagtgagagggaggcaaggggagagaggagagagaagacaagagagagagagagagagagagagagagagagagagagagagagagaatgtagtaatatttagcctgtgagcactgtggcgaaagtaattctaggcaactacttggtttctgaagttcaaggagaaaccacccacagcaggtgcagagaaaaaaaggcaggtgggagttgctcccgatgggaaagagctccctgcctatgagtggcagccggctccaaggagcagaagccagcttggtctcagtttgctgcgaagggatggagcagggtgagaagctctgcctgccccagaccttgaaggattataatggaaatttttgagagtgtgaaaaagaaagaatacgaaggagagggagtgcatgcttttggagacttccttcacaaaccctaatttagattgtttggggtcaagcagcagccagccaccttcctcctttcctccttaattaattaataagaatgattaattattaggattttgaatgtcaaggcttcaaaatgcctttggctagaggctgatgagttgcttaagccatacatgtagttttaacttgggataagggagttgagactttagaggtgtgtttgctgtcactctgtctttttttttttttttttttttttttgcctttgcatctgcttccccagtgatctttctctgtctgcatttctctgtcttgtctccatctccttctgccttgatatccgcccccacccccaccctttgttctcctggccgttttccccatccagtctcccctggccatggctcaatcctcctagctctccggggaaagaggaggatgctaaagctgccattcctacttgggtatctactgcgggcacaggcatctcggaatcccactgcatcatcggtggcaggaagtgggtgggcattaatgtagtttcactcgctggatcgagagttattgacagcttagattttcttttttctgcttgtcaaaaatttctttctctttcttttcttctctttttttctttttttttttcttggatacgggaaccagaaccacgaaatcctgcaagctttgaaggccggcgaaagggctcccccgtcggtggcgccggagggagaagcgtttagtcactgtttcattaggcactatttgaaccttgcaacatgtggtaatttctggggcaagctgaaaaggggggattatgtaggagggacataaggaaattagccaacggttaatttaactcgttttctgctagacttttcgatacattcctaattgactgaggggcaggtgaagctcccgccccatgcaggctcattcacggtgggaataaatggctctttctcaactcacactgctcacaatatatcatcagggaaaagacatgcaatgaatatgttgattttttttattaatggaattacaccctgccatgcaggtgtgagggtaaaaacctatactgcaatgaaataagattaacaatgaaattagaattttattagctttatatgtcacacagacctggatttgaactgtcaaaacaagcaacaagaaaagatattctgaacgcagccctgtcaatcaaccaggagaaacgaacagcgtggtatcgaaatcataatcaccttccagttcttcagcgcctcacttgggccttacgtgagaagcaagtgggtggaggaccccgcgtgggcaaaggcctggtctctggacctgcagatagtagatgaaaaacaccacctgggttcggtagacccggcctaaaaaaggctcgggtccaggctagaagggcctggatggcccgaggcctccaagatatcagacggaccggctgggcacccgcggcctgcaggccatatttcgcgtcctccaaatcagctgcctagggcgggccgtgacccgagggaattggagagaaaagtccaaacgctgggcgagaggcggggtagggcgccctttggaaaccgccctgggttttgttactccggggcccccggagcttcggcacagctacctgggtctggcaggcgcagaggtgccgtatgcaaatggttcactattaggcgagaaagaaatacttcaaatggccctttgtaaccttctatagaaaatcgaggtactctgcatgacaaagcacaattaagctttctattcaggagttctgcagctggtagcccattgggaaagtgggaggaaacgcgaatatattaatagtgtggcgaaagttttttgtgtgcgtgtccttttctaggtcgggggtggggaggggcggtgggtggacgcagagggaggaaggctcagccttggatccttgccacctgaacaacgtcgcctctgcccacgtggaaagcctcgcttgtctggcagccggggttctgaatggttgccgcgacccctgcgctcccagcagggccaagaggacctcgcgggcaccagcgtccgggcgggaagggacgtgtgcccaagcctcgcctcctggccctcagtgggctgggacgcccttgatcaccggcgcaggaaagaggctccccagcccgtgagcttcgtccgggcgccagggcagggatggctggtggtgtgcactggagagcacgacggtgacgctgcgtgggaaagagacgtgggaagggcatagccggattatccactcagctccaattttctccaagcgccactcaccccacagttgaggttcgcttcccgattgttcatttgtagagtctaaagggaaagaaaattttgcctctgaataaataaagggcccttaaaaacaactctgctgattatcctgcgttttccatctggatccatttcgccctcttctgccctgctgggtgccctcggacactgacctttgtggacagtattagttcctttatcaactgcgtcactggcaggcgcttgcctctggcttccatttgcatttggtgaataagtggcactgcaaataaccgaacaacctaaggatagagaactgcaggtatattgtttctgggaatgttatattgttccagttctggcagttgctgcttctctagaaattctttttctctttgagagcctattttcctaggctctggcttttaatcagactccccctgtgccttcaggcatgaagtggaaatgccttctagtttctgctagtcccctgggtgcatcaaaattcttgttagttccattagccctacacacatctctgcaaatagtcgctttgttgaaaagtgtctttaaaaaccctagctcacattggttacctggctcctgatcagccatgttatgtttaagtcaatcccttctataacagccagctcaactgtcaccatacttttgctgggacaactcctgtgagaggaactccaccctctaacccatttcattttcagacagctttgaccattagaaactttcttgtgttggattagaatcttcattcagtattttttatccattgggtcctacctagttctttctccatggaacttctaagtgtctgtcttctccctattcccaactgtgaggacattgatgacagcaactgcatctttcatctctatatccttagcattcatcacaatgcctagcacctactagcagatgcccagtaaatgctagctgggtcagtgcatcatcttacttccaagtctctaccagttgcatcaatcatggaggacttagaaacagctatgatgaaatatagcttgaagatgggatatatctataggtgtgtgtatacacatgataaatatatgtaaatgtttatataggctaaatatcatgtacataaggtaaatatattgagaagtttctggagacaatctacgtgctttaccatttactagcagtgtgacctcgggcaattcacttcatccctctgacttccacttgcctcatttgtaaaataaggataattaatagttgagaattaaataaggacattgatagttaaataaggaaatagatgtgaagatatatagctatttagataaagtagccatggaaggtctaactgaaaaagtaacttttgaatagagacctaaagagaatgtggagaactgatcacatggcttgctggagcaagagaattccagacagaggtagaaacaagtgcaaagacgtagatgggaacatgcctgcaaataaaaaatatgtgggtaaatataaaagatgtttttaaaagatctcttttaaagataattgaatattttaaagcaaaaatagtaatatattgtggagtttataacatacagtttttttgttggtttttttttttttactttttaaaaaaaaattagagatggggtttcactatgttgcccaggctgattttgaactcctggactcaggcagtcatcccacctcatcctcccaaaatgctgggattacaggtgtgagccactgtgtctgtctcagctgattctttttagtcatgatagttatgctctgtaaagttgttgaaaatgatgaattagtgaacactgaacattgttcacaggggaaatacagagttagattctgtaaacctctggttgcaacacttttgtcaagcaatcaacacataaccttgttttatgtgtgtctctatttaaagacagcttatgtaatatatatcattgatttattaacatggagctcacagccaacatgtctgaacaaagctcatctaacacacacataaggcacatccatgtcttctcgtactaggaataccagatataattttacaattgcccctgggagccatttttttatggtgaaaaatatatatggcataaaatttactattttaattatttttcagtgtacaattcagtgccattaagcatttttatattattctgcaaccaccaccaccaccattacccatctctagaacgttttcatcttctcaaatgaaacctccatacccattaaacaataactcccctgtcctgtgccttctgccctgacaaccaccattctactttttgtctctatgaatttgagtactctaggtacctcattgttctgtgaaagggctgtatatgcaaagagatccccaaataccaaagaagtgaagaaatcaaagaaggaagcagacaaatccagtttgttggtatgagattatttatcaggggaatttatggacagaagcatggtcttgggggctgcaagacaggtagatcttagcaccacaacctcccagatccttagggaggctgatgtcttggggaaaagtataaaaatatgtgctctggaaggaatgtataggtgctacaggaatcctagcctatgatgtttgtaacagcattaagtgttgttttggaggaaacttacagtgactagctgtttctacacaaaaagtactgacacctagacattatggaggcatttttggactcagggttagtcagaagtcactcttgttcccacactcatataagtggaatcatacaatatttgtccttttgtgacaaggttgaataatattcccttgtatgtatacgccacattttgtttattcattcattcattgatgaacgctggggttgcttctatcttttggttattatgaataatgctataatcacagtgtgatatgaacgcaggtgtacaaatgtctctttaagaccttgattttagttctttgggtatacacccagaagtggaattgctggatcttatggtaattctatgtctaatgttttgagaaattgccatactgtttttcacagcagctgctccattttacatttttcctcagcaatgcacaagggttcctgtttctccacattttcaccaacacattatttgttgttgtcattttttaaaataataagtaatagccattctaatgggtgtatgtgaagtggtattttactgtgttttgttattcatttccctaatgcttactgatgttattttttatttatttatttttttgagacagggtcttgctctgtcgcccaggctggattgcagtggcatggtcttgactcattgcaacctccacctcctggcctcaggccatcctcctacctcagcctcatgagtagctgggaccacaggcatgtactgccatgcccagataatttttttttttttttttttttgtatttctagtagagatgggatttcaccatgttgaccaggctgatcttgaactttggcctcaagtgatcttcccacctcagcctcctaaagtgctgggattacaggtgagccactgcacctggcctcattttgaccatttttaaatgtacttattggccatttgtattttttttgaaaatcatttatttgaatcttttgctcattttaaaatcaggttggtttttttggttgttgcattttaagagagttctctatatatcttgaatatcaatctcttatcagatatatgatttacaaatactttctcccatttcgtggattccctttcaccctgttgatagtgccctttgatgcacaaaagttttcaatcttgaagaagtccatcttatcaattttttcttttgttgcctatgcttttgatgtcatatccaataaatcattgtcaaacccaatgtcataaagcttcttccctaattttttttttgagacaaggttttactctgtcacccaggctggagtgcagtggtgtgaccacagctcactgcagcctctacctcccaggctcaagtgatcctccaccctagcctcctgaacaggagggactacaggcgtccgccactacgcctggctaatttttgtatttttatagagatggggtctccccatgttgcctgggctggtctcaaactcctggactcaagcaatccactcttcttggcctcccaaagtgctgagattacaggcatgaaccaccacgcccagttttatgttttcttttaagagagtttatagtttatagttgggtctttgatccattttgagtttatttatttttaaaatagttttaaaattttcattgcggtaaaaaacacaacataaaatgtatcatcttaaggtactgggggttatgacttcaatgtgtgaatctgaggggacacacttaattcaacctgtaatgacaaaatttgaggaaaaactaggtttttatccttaggctgtgttgatttcagcaaaccaaagtgatatttaagcaaatattctttaattatctgattgataaacataaagctcttgagcaaatgtgagcccaaaacacaaaatagacaaacaactctgcctcttttctctcacagcatattttatgatctgtgtaactgtattagcccctccgaacttctacttgatttctcccccaaaggcaaagcatctggaagggtcactgagccaggaatttctgtatatcttagttatacatatgcactaaaataagattttaaaaattgtggttaaaaaacaaatcataaaagttaccatgttaacaatattttttttttttggagattgagtccagctctgtcgcccaggctagagtacagtggcgtaatcctggctcactgcaacctccaccttccgtgttcaagcaattctcctgcttcagcctcccgagtagctggcattacaggtgcgcaccaccttgcccagctaatttttgtatttttggtagagatggggtttcaccatgttggccaggctggtctcgaactcctgacctcaggtgatccacccacctcggcctcccaaagtgctaggattacaggcatgaaccaccacgcctagcccataattaaccttttttaagtatacggttcagtagtgttaagcatatttacattgttatgaaatagatcaccagtactttttcatcttgcagaactgaaattctatatccattaaacaacatctccccattttccctttccctcatcccctggtaacagccattctactttctatatcaatgaattcgactattttggataccttatataggaagaatcacacggtgtttgttcttttgtaactggcttgtttcacttagcataatgtcctcaagggtaatctatgctgttgcatgtgacaggatttctttccttcttaaggctgcatagtattccattgtgcatacatattgcattttgtctattgattcatccatggatggacatttagtttgttcccaactcttcgctattgttaatagtgctgctagatataggggtttgcaaatctctcttcaaaaccctgatttcagttcttttggagatatattcagaagtgggattgctagaccatacggtagttctgttttaactttttgaagaaccaccatactgttttccaccgtggttgtaccattttatagtcataccaacagtgttcaagggtccaggcctctccatattcctgccaatacttgctgttttctggggttttgcttgtttgttgtttttgatattctaagaggtgtaaagtgatatctcattgtggttttgatttgcttttctctgatgattagtcatgttgagcatctttgcatatgcttgatggtcatttgtgtattatcattggagaaatgtctactcaagcagatcctttatccatttttttcacttttattttagggtcagggctacatgtgcaggtttgtgatataggtaagctgtgtctcacaggagtttggtgtacggattattttgtcactcatataatcagcatagtaccagataggtagtttggccatcctcaccctcctcccaccctctaccctcaggtaggtcctggtgtctgttgttcccttatttgtgttcatgtgcactcattgtttagctcccacttataagtgagaacatgcagtatttggctttctgtttctgtatttgcttaggataatggcctctagctccatccatgttgctgcaaaggacatgatcttatttatttttattttttttgagacagagtctcgctgtgtcacccagggtggagtgcagtggcatgatcttggctcactgcaacctccacctcccggctccaagtcattctccttcctcagcctcctgagtagctgggattacaggcacctgccaccacagccagctgttttgtatttttagtagagacagggttttaccatgttggccaggctggtcttgaattcctgacctcattatctgcctgccaaagtgctgcgattacaggcatgagccaccgcacccggcgatctcactcatttttatagccacacagtattccatgcctttacccacttttaaaatgggttatttgatttttttattgttgttgagttgtagttgtttatatattctggatcccttatcagatataggatttcaaaatattttctcccattccataggttcccttttcactctgtggactgtgtcctttgatgagcaaaagtttttgagtttgatgtagttccatttgtcttttttttcttttgttgctcgtgcttttggtgtcatatccaaaggaagaaatcattatctaatatttatcattatccagtgatatccactaaatcattgccaaatccaacatcatgaagcttttcccctatgttttcttctaggagttttataggtctaggcctcatgtttagatctttaatccattttgagtccatttttttttttttttttttttttttgagacggagtctccctgtcacccaggctggagtgcagtggcgcgatctcggctcactgcaggctccgccccccggggttcacgccattctcctgcctcagcctcccgagtagctgggactacaggcgcccgctacctcgcccggctaattttttgtatttttagtagagacggggtttcactgtgttagccaggatggtctcgatctcctgacctcgtgatccacccgcctcggcctcccaaagtgctgggataacaggcgtgagccaccgcgcccggccttgagtccatttttgtatatggtataagataaaggtccaactttattcttttgcatgtggacatctagttttctctttctttctttttttctgttttttttttttgacagagtctcgctctgtcgcccaggctggagtgcagtggcatgatctaggttcactgcaacctccacctcctgggttcaagtgattctcctgcctcagcctcctatgtagctgggattacaggcatgtgccaccacgcccggctaacttttgtatttttattagagacggggtttcaccatgttggccaggctggtctcaaactcctgacctcaggtgatccgcctgtcttggcctcccaaggtgctgggattacaagcgtgagccaccgcgcctggcctgacatccagttttcttgacactatttgttaaggagtctgtcctttccctattgagtatggctggaagccttgttgaaaatcatttgaccatatgagagggtttatttctgagttctctattttcttccactagtctctatatctgtctttatgccagtaccagtctattttgattaccatacctttgcagaaaatttttaaatcagaaaatatgagacttctaactttcttctttttcaagattgttttggctatttggtggttccttgagattctacatgaattttaagatggacttttctatttttgcaaaaaaaaatgtcattgggattttgataggaattgcattgcatctgtagatcactttgggtaatattgacatcctaacaataccaagtcttccatgaacaccagatgtctttccatttacttatttctttcaacaacatttcatagttttcagtatacaagtcttttggggggccactttaaacagtgaaatcatctacatggaaagcacaacatataaacaatgtggcaataactagaccaaaaataggacacttatttacattagaagagctgaaacaaagaagacaggcattgccttatttcttctgattggattgtgaacctcaagggactcaaagattttgctgctctgagcatgttcacaaataattacagaattaccatatagattttggagttacaaataaattgtagcaagtaggtgactttacaaatatagaatctgtaaataatgagaataaagtgtatacagaagtaaagtaaaaggcaacaatagcacagaaactgggagagaaaaatggaagcacactgttgtaaggcttttatataataggccaaattcttctacaaaaggtggtctaggccaggtgtggtggctcacgcttgtaatcccagcactttgggaggctgagttgggtggatcatttgagatcaggagctcgagatcagcctggccaacatggtgaaaccctgtctctactaaaaatacaaaaattagctgggcgtggtggcacagacctgtaatcccagctacttgggagctgaggcaggagaatcacttgaacccgggaggcagaggttgcagtgagccaagattgcaccactgcactccagcctgggcaagagagcaagactccgtctcgattaaaaaataaatcaataaaaaggtagtctaatattatttgaaaagagactgataagttaagaaggtacactgtagactttgcagggtgtagttgtgtgtacccatagtcccagctacttgagaggctgaggtgggaagatcgcttgagctctggaattccaggctgcagtgagctgcgattgcaccactgcactgcagtctgggtgatggaagtgagatcatgtctgtaaaaaagaaagagaaaaaagaacaagtgaggaatgtacactgtagaccccaaagccacaaacccagacaaaagagaacaaataaaaagagatacaaccaataagctaataaagactataaaatgaaatattaaaaagtagtgctagtgagagataaagaattaaaggaactaaaaagtccactaatgaaagcgtaatgactgaagcaagaaatagaccaaatgtgaagtgttggtttatattctgagcatattaggagaaaggcaaactggaatctattctggggaaaatagccaggacatgcagtcttgttgcttttgccccctgcttgtctctccaaagatgatgatgagctcatctcctcttttttcaatcctaatgaccaagagcttatattattgagaagtaacggttctgagatatggcaattgttagtcaaggaaacaattcttccaagtgtgattagtttgtgataattagctggtgttactatgtcgaaatgatttgaactgttttagtaaactatgcagggctactgagcaatgcaaacacagttttatgattgtaagtaaactttaaaaaattactcctggatatatatccagagtcaatgtggatagccttgctaaagagatgaagattatgttagtatttgtaaaaacctcaaagaatccaaagatatctttaaagaaacatatatatattattttcttttgagacaggatctcactgtgtcccccaggctggagtgcagtggcatgatcatggctcacttcagccttaagctcctgggctcaagcgattcttctacctcagtcttctgagtagctgggactacaggcacgtgccaacatgatcgggtaatttttttgttttgttttgttttgttttttgtattttttgtagggacggcattttaccatgttgcccatgctggtcttgaactgctgagcccaagcaatccacctgcctcagcctcccaaggtgctgagattacaggtgtgagctaccacacctggccaagaaaccacatttttttaaaaatctggaaatatagtcacctgtgtattgagaagaagcttaccaagatgaggttttatttatttaattaattaatttattgtttttgagatgaggtctcactctgtcacccaggctgaggtatagaggcattatcacagctcactgcagcctcaatctcccaggctcaagcaattcttccacctcagcctcctaagtagctgggaatgcaggcaagcaccaccatgcccagttactttttaaattattattattttgttttgtagagacagggtcttgctatgttgcccaagctggtcttgaatgtctaggctcaagcaatcctcctgcctcagcctcccagagtgctgggattacaggtgtgagccaccatgcccagccccaacaattgtatatatgagttacagttgatctaaaatttcaccaactctgtagactcaggcttcttaacttttggcaatccagtgggtgtaaaatataattccttatggtcttattttgctaattactagtgagtttgaggaactttcatatctcttttcaccattcatattttctcttttgtgagatgcctgctcatacttcctgtccagaactatattgcatcatgtgtgttttactgatttactgttttatggattactaattttttggactttggatattctggatactaacccttcaatgattataagtgtagcaaatagcttctttatttctctatggtgccttttaaagaacaaaagttctttttttttttctttttttgagacagagtctcactctgtcacccagggtgcagtgcagtggcgtgatcttggctcactgcaacctccacctcctgggttcaagtgattcttgtgcctcagcctcctgagtagctgggattacaggcgtgcaccaccatactcagtttttgtattttttagtagagatggggtttcaccatgttggccaggctgatctcaaactcctggcctcaagtgatccgcccgtctccgcctcacaagtgctgggattacaggcgtgagccaccgtgcctggctaaaagttcttaattttaatgtagctgaatttatctgtgcctttcaatcttgtttaagaaatacttccctaccttaaggttataaaaatattatcctataacgttctctaagagaattcaagttttgtatataatacagcagagactgcttctgtgtatgatatataagtatatgattttctttgttttttttcataacctattgtcccaacaccatttactgaatagttcaccatttttgtcataaatcaagtgtccacgtaagtgtgggccttttttttcaggctttcaattttgttcagatgattactttgtctatctgaactgatactaagctgtgttaagtactatgtcatctatgataagtcttgctatctgacagggcatgtcctcactcatgttttttgttgttgttgttcttcagggctattttaattattttggggtcttttatctgttacataaattttagagtcagcttaagttactcaaatactccttttgggatttttataggaaaagcattgagtctgtaggtaaatgtgggggatgttgtgaagtgtagtgtgtaattgtataattatatacattgtataatactaagtgttctctcatcaatgcagtgtgtttctcctttgtagtcttcttcatatcttttatttctaggtacttatatttattactgctattgtaagttttatcttttgaaattttgaaatcattttatactcctaaaggtgtaaaaatagcataaagaattcccaaatatccccttcactaagattctccaaatgttaacattttatcttatttgcttctctctctctttaaatatatatgtgtgtacacatatatttatttatgtattttttttcttaaatgtttgaagttaagttacagatttatagtactcttaagtactttacctctaaatacttcacaatgcatttcctaaaattagatagtttttctgggtatacaatttaagattgacagaattttttctcaacactttgaagatattattccactatctcctgccttcccacattatgaaaaagtctgttatcactctaattgtcattccattattggtaatctattttatctcagtagttgcattctgtgtgtgtgaggggagtggtagggaggggcattggtgttttgtatttcacagaaatatgtttaagtgtagatttctttctatttgttttccttggtattcattttccatctgtatctgtggatcaatgtcatacattgcttctggaaaattctcagccataatagcttcaaatttttttttcttgagacagagtctcgctctgtcacccaggctggagtgcagtggcgcgatctcggctcactgcaacctccgcctcccaggttcaagcaattctcctgcctcagcctcctgagtagcttggattacaggtgcctgccaccatgcccagctaatttttgtatttttagtacagacagggtttcaccatgttggtcaggctggtctcgaacctctgaccatgtgatccacccacctcagcctcccaaagtgctgggattacaggcgtgagccaccgtgcctggcaaatagcttcaaatattgccacttctcagtcttatctgttctctacttctggatttgaattagatatatacacttctatctcttatcatactatccatttgggagtgagagggctgtattctggataatttattctacccaacttccagtttactaattctgttttaagctgtatctaatttttatccatatattcaaatttttacttcaacaatttttaaaaactaaaaattcactttggcttcttctaaagtctggccactttggataatcttttattcctcatatttgtgtttctgtaatttattgctttatgactcctatttatttcttcttgtttgttttctttttcttccacatcagatggataacgtactgacatcataacaaggtttgagggaagcacatctcacacataaacatgaaaacccaatcatcgcatttatgaactacaaaaaagatctcctatttatttaaaacatcttatacataattaaaataattaagggtgtccaaatctgttgtttgtgatttcagctggctctcactcagaagaaactcattaacacgtatgcttggcagtcagatttcattaaccttaacttgtagaaaatccgtcgaatgaaactgtgagcggaatagcttctgctaggagtcacttttgttccctttctttaatcaggaaagctcagcttcagcttctattttttttctattgacccaaaatttgaactctacattgcagagctgatatcacatatgcctgcaggacaagctgactttttaagcatcttaggacttctattctggtgtcagttcaaggtttggacctactgtcagaggtttaccttatttcctggaagcccagcaataaacattttgttttgtgcaggatctcattattttgtagtagggaattcctttagactattttgtctaccacgtcagttttgttttttttttctttcttcagctgaggaagatttttttccccacttttttttttttttttttttttttgagacaatttcactcttgttgcccaggctggagtgcaatggtgcgatctcagctcactgtaacctccggctcccgggttcaagcgattttcctgcctcagcctcctgagttgctgggactacaggcatgtgccaccacgcccagctaattttgtatttttagtagaaatggggtttctccatgttggtcaggctggtcttgaacttccgacctcaggtgatccacccacctcggactcccaaagtgctgggattacaggcgtgagccactgagcccggtctggttattacttcttatgttaaatggtcaaacttatcttaaaggtattatggtcagaatggcatgtattggttcgacagctgtcaagtagatctgtaaatagaatagagattgtaggaacatatttaggtatttgttaggacttaatatatgacaaagatggcactgcaatcattgataaagtatggtttatgtaataaatagtgtaacataattggttatgtatatgaaagtaagaggtttccttcctcattccatatagataggtaagttttatctttaaaattcacttaaatgtaaaaacaaacctatacaaatatatgaaaaaatggagaaaagtgtttttatagcgtcatggtggagttgaccttaagcaatgtgggaaattcagaaacaacaactgaatgttggcagaattgactactatctcatgtttaagaatttatcctatacgaaaaagtcagttaacaatgaccaaagagtccagtcttaaggatggatgagaataggctgggcgcggtggctcacgcctgtaatcccagcactttgggaggccgaggcgagcggatcacaaggtcaggagattgagaccatcctggctaacacggtgaaaccccgtctctactaaaaatacaaaaaattagctgggcgtgatggccggcgcctgtgatcccagctactagggaggctgaggcaggagaatggcgtgaacccggaaggcggagcttgcagtgagccgagatcgcgccactgcactccagcctgggcaacagggcgagactacatctcagaaaaaaaacaaaaacaaaaacaaaaacaaaaagatgaatgagaataatgatctggattctgtttaagtctgcttaaactaagttaccttgaaggtctatgtaagataaaaatgcaagtaggtagatgtggtttcccattgcctcctttgtctttttatggaaaagtctccaaaggtcagagatgctaacaattagttgttagcatagatatagaatgagatgtctgcctggtgagagaatcacaacaatgtagaatttaggtcttttatatcctcaagaaggtcagctcccaaaattatacttactattgtaaaaagtaaccatccttggaaaggcacatcatccccgaaccaaatggctgcattctagaacatgtaattcttgctgtattgtcattgaaacaatatttcctcatctgttctcatgcggaagaattttttttttaattttccttactttggggctttccatgggctaccctcccttggcctagccagccagtacataaggtaatacacaaaaaatcctggcatagtgactggtacacaataaatgtttggtaacttttagcattataattagacttgttacagacaacatgcactacttttgtaattagaaaaaaagccccctaaatagaaaaatagaggaaagaaatactaaaaaaagtttaatatgtttgcacattgacactgtaattccagttctaaaaattgttcttcagaaagaatcacacaagtacaaagatgtgcataaaaggttgattgtatcagcattgtttgctataggaaaaattataaacagcctaaaagttcaggcattggttaaataatgtataatatattaattatatagaatacaatgtaatcttatatatacacactaaatgtgatactaaagtaaaaaatatacatgcagaacattactttaatcatttaatcaatgaatatttattgaatgattactatgcattagacactgccaaaaattagggatataatgttaaagaaaacagacaaaccctcatgaagcttatatatacatatcaacagcagtggtggcctttgctttgtagaattggggctggaaggaagtggattttgtaaatttttacgcttcctttttttttgagatgcagtctcactctgtcaccgaggctggagtgcagtggtgtgacctcagctcactgcaacctctgcctccccggttcaagcgattcttctgcctcagtctcctgagtagctgggactacaggtgtgcgccaccacgcccagctaatttttgtattttagtagagacagggtttcgccatattggccaggttggtctcgaactcctgagcttgtgatccgcccacgttggcctcccaaagtgcttggattacaggtgtgaaccaccacgcctggccatttttactctttttactttttatacttagcttatacaacattgtattgtaagacattttctagaatgattgtataatttaaaacccaatagattttttttttttttttggaagcagagttttgctctacggcccaggctagagtgcagtggcatgatctcggctcactgcaacctccacctcctgggttcaagcgattctcctgcctcagcctcccgagtagctgggattacaggaacaagccaccatgcccagctaacttttgtatttttattagagatagggtttcaccatgttggccaggcttgtcccaaactcctgacctcaagtgatccacctgccttggcctcctaaagtgctgggattataggcatgagccacggtgcctggccccagtagatatattttttaaaattttagttattatttctgtctgagtctgtctgtgctgctataacagaatactataaatgagtaattgataaagagtgtaaatttatttcttacagttccaaaggtgggaaagttcaagatcaaggcaccagcattggtattttgtgagggctgctgtctgctcccaagacgtcaccatgttgctgtgttctcaagtggtggaaggcggaagagcaagagagcaaaaaggacctaagctagttcactccattcatgagggcagatcccccaggacctaatcacttcccaggaggtcccagctcttctcaggccatcctcctaccttggcctcccaaagcactgggattacagatatgaaccaccacgcctggccactggtagttaatttctttttttaaaaaaattattatgttaaaacttttgtgggtacatagtaactgtatatatttatggggtacatgacataggcatgcgataagcaataatcacatcatggaaaatgaggtatccatcccctcaagcatttatcctttgtattacagacaatccaattacactcttagatatttttaaatgtacagttaaatatcattgactataatcactcttttgtgctatcaaatactaggtcttactcattctttctaactgtatacactttttgttcccactaaccatccgcaggctgggcggagtggctcactcctgtaatcccagcactttgggaggcccaggcaggcagatcacttgaggccaagaattcaagaccagcctggccaacatggcgaaatcttatctctgctaaaaatacaaaaattagcaggtgtagtggtgggtgcctgtaaccccagctacttgggacactgaggcatgagaactgctcgaagctgggaggtggaggctgcagtgagccaagatcatgccactgcactccagcctgtgacagtgtgtgactctgtctcaaaacaaaaacaaaaaccatctccgcttacccccaacccctcactacccttcccagcctctggtaactatccttctactctctatctccacaagttcaattgtactgatttttaccacccacaaataagtaagaacatgtgaagtttgtctttctgtgtctgacttatttcacttaagataatgacccccagttccacacatgttgttacaaatgacagaatctcattcttttcatggctgcatagtactccattgtacatatgtatcatattttctttatccagtgatatgttgatgaacatttaggttccttccaaatcttggctattgtgaacaatgctgcaacaaacatggaggtgatagctgacatactgatttcctttcttttgggtatatacccagcagtgggattgctggatcgcatgatagctctatttttaggttttttttgaggaacctccaaactgttgtctataatggctatactaatttatattctcaccaacagtgtatgagggttccctttcctccacatcctcaccagcatttgttattgcctgtcttttggagataagccattttaactggagtgaaatgatatctcactgtagttttgatttgcatttctctgatgatcaatgatgttgagcacatttttatatgcctgtttgccatttgcatggcttctttggagaaatgactattcaaatcttttgcccatttttaaatcagattattaaatttttcctacagagaggtttgagctccttatatattctcgttattaatctcttgtcagatgagtagtttgcaaatatttttttcccattctgtgggttgtctcttgattttgttgattgtttccttggctgtgcagaagctttttaacttgatgtgatcccatttgtccatttttgtttggttgcctatgcttgtggggtattactcaagaattttttgcccagaccaatgtcctggagagtttcctcagtgttttcctgtagtaatttcatagtttgaggtcttaagatcaagtctttaatccattttaatttgatttttgtatatgatgagtcgtaggggtctagttttatttttctgtatatggatatccagttttcccagcaccatttatttaagagactgtccttgctccaatgtatattcttggcacctttgtcaaaaatgagttaactgtaggtgtatagatttgtttctggcttctttattctgttcaattggtctatgtgtctgtttttatgccagtaccatgctgttttgattactatagctttgtaatataatttgaagtcaggtaatgtgatttttccagtttcattctttttgctcaggatagctttggtgagtctgggtctttgtggttccatataaattttagcgttgttttttctattcctgtgaagaatgtcattggtattttgatagggattgtatttaatctgtagaccgccttgggtagaatggacattttaacaataatgattcttccaatacatgaatatggaatatatttctatttttaagtgtcctcttccattcctttcatcagtgttttatagtttttattgtagagatctttcacatctttggttaactcctgggcatttaattttatttgtggctattgtaaatgggattccatttttgattctttttcagattgttcactgttggcatatagaaatgctacaaatttttctatgttgattttgtaacctgtaactttactgaatttgtttattagttctaatagttttttggtggagtctttaggtttttttttaaatataagatcatatcatctacatacaaggataatttgacttctttctttccaatttggaggccctttatctttctcttgtttaatttttccatttaggacttccagtactttccattgttgaaagtggacatacttgtgctccagatcttagagaaaggcttccagtttttccccatgcagtatgatactagctgtgagtctgtcatatatggcttttattatgttgaggtatgttccttctatttccagtttttggagggtttttatcatgaagagatgttgaattctatctaatgctttctcagcatcgattgaaatgatcacatggtttttgtctttcattctgttgatatgatgtgttatatcacattgattggtttgcgtatgtttgaccattcttgcatccctgggataaatcttacttcatcatgatgaatgaataatctttttagtgtattgctgaattagcttgctcatattttgttgaggatttttgcaaaaatattctttagaggtattggcctgtagttttctttttttgatgtgtctttgtctggttttggtatcaggatgatactggccttgtagaatgagtttggaagtatttccctctcctctattttttcagttcattttgagcaggattggtattatttcttctttaaatgtttgctagaattcagcagagaagctattaggttctgggcttctctttgctgggagaccttttaattacggctttgatctcattatttgttattggtctgttcaggttttggatttcctcatggttcaatcttggtaggtaggttgtatgtgtctaggaatttatccatttcctctagactttccaatgtgttggcatacagttgctcatagtagccactaatgatccgttgaatttctgtgatatcagttgtaatgcctcctttttcatctctgattttatttattttgtcttctttctttttatcttttagtctggataatgatttgccgattttatattttcaaaaaaccaactttttgttctgtcaattttttgtatttttcgttcattttaaattcattcatttctgctctgatttttttttttttttttttttttttttttttttttttagatagaatctggctgtgtcactcaggaggcacagaggtgtgattttggctcagtgcaacctccacctcctgggttcaagctattctcctgcctcagcctcttgtgtagctgggattacaagtgcacgtcaccatacccagctaatttttgtatttttagtagagactgggtttcaccatgttggccaggctggtcttgaactcctagctgggattacaggtgtgagccaccaagcccggcccatacattacattttaaaaaaactgcatctgaatttctgctctatactctacattttatttgaatgtcctctgatcaaaaagttaccagatttattaaaaataccttaaaaattatatctttttacactatcttcctcagaatttggcagattaaaacaaacattcacaaattattgagagtaaactgtttctcaacaattgaaatgtgtagtccttgtagctacacattttgactatgtccttcatatgatttaaatttcctttgcacaatttcttagaggtttgagaatttctcaatagaataaaagaaaagcacaagtcctctacccattgaaaaaattttttgagaaatgctatcaggttgatagactttatgaattcaaaaatttggaaaacttttctatatgtctaagcagcaatttagtttttcatacatgtgtgtatgtgtgtgtgtatacacatatatatgttaccttctggacacagcattcaaacaataatttctaggagagaattgtaggtaagagctaaaggatgtgtactcaggaagccagtaatggcgtgtggtgcctgggttccaagctagcctttttttttttttttttaatgatatgatcttattttattttatttttttatttttatttttttaattttcttattttattttattattattatactttaagttttagggtacatgtgcataatgtgcaggttagttacatatgtatacatgtgccatgctggtgtgctgcacccattaactcgtcatttagcattaggtatatctcctaatgctatccctcccccctacccccaccccacaacagtccccagagtgtgatgtttcccttcctgtgtccatgtgttctcattgttcaattcccacctatgagtgagaacatgcggtgtttggttttttgttcttgcaatagtttactgagaatgatgatttccaatttcttccatgtccctacaaaggacatgaactcatcattttttatggctgcatagtattccatggtgtatatgtgtcacattttcttaatccagtctatcattgttggacatttgggttggttccaagtctttgctattctgaatagtgccgcaataaacatacgtgtgcatgtgtctttatggtagcatgaattatagtcctttgggtatatacccagtaatgggatggctgggtcaaatggtatttctaggttgccttttttgaaaaaacgtagtgttgcccatacatatgcaaatgataataaaccaataatgtattaactgtaatctactagaaagatttcaccagcaataaatgtttgctgtagataccttttgggggtagatgcctttaagatgtcaaaaagagtcacattttatctttgattaaagtgtttcatagagtaatatgccatgagagtggctagaagaggactattacacatagtgtgtttgagtaaagaaaacatgatctactgataataaaatgttagaaaatagactatcatgatttcaagttatacagttgcactgcctctgacctgaagatgagcagctgtaaagggatctgatttgagagaggaagggactaagagagcttctgttgcctcccatttcacttctgcacctgccagaccctgataccttaaatggggaatggggagatttgcagagtactacagatactgagtactgtctatcagcagagtttgatacacttaatggaaattctacctattaagtgattattcattcatctattagataaatgagaatgctttgcaggaggtaggcacctagtaagtgccagatggcaacttaagtttcaatacagtcatgcggagcttaacaactgggacacattctgagaaacgcatcactagattttgtcattgtgcaaagatcgtagcatgtacttccacagacctagaaggtatatatattattatttatatatattcttcacatggaaaactaaatgccctatcaccattattgaatatcaatcttttcccccacttaatgtgcagtgccagtatcttgtgccaggtatcaggtttctatatgtgctccattataatcttatggtatcaccatcatacatgtggttcatcattgaccaaaacatggttatgtggcacatgactgtattttggaaggatggagacttttgatattcagcatctactgctattctcttcacatgctctattttttgcattgatagctaaaaactacagtatccaggctcccttgcagctaggagtttagatgtagtctctgcccttgaggcagttacatgacatttgaaaatagaagaaagtgaggcacagtggctaggctgggcacggtggctcacgcctataatcctaacactttgggaggctgaagtaggcagatcacttgaacttaggagtctgagaccagccttggcaacatagtgagaccttgtcaaaaaagaaatagagagagagagagagagagagagagagagagaaagaaagaaagaaagaaagaaagaaagaaagaaagaaagaagaaagaaagaaaaacagagagagaaagagagagagaggggagggagggagggacgaaggaaggaaaagaaagcggaagagaggtggaggccattgtattcctgtggaggtgcaggagcacatgtaggctccaatagatgtgagtgtgggcagtgctgggcaacattgcctattctactgccacagtggcttcctgacctctggaccccagaagtggcaatgtatcaccttgaagccaaaagcctagtcctagtgaccaatttttgctcctttcaaaaccatctttcaatggttttgtaagcatctaactttctctactaagttccttcctgattaaaatagctttttcctgcactaaaccctgacaggtactaattggtgtaaggtgagggattctacccctttgtctttctgcatactgcaataggccacgtaatcaatggatcagtcctactgttgcaaattcaatcagtcttaactgtactgcagcatatcctgatgagctcaaagatgtcataccccaccattttagttcactcaggctgccatcacaaaatatcataaactgggtcgcttatagataacagaaattttatttctcacagttctgaaactgggaagtccaagattaaggcaacagcagatttggtgtctggttgagggccaccttcctaatggagggaaacttctcactatgtcctcacaaggtggaagtaaggggtctcaggcctattttataaggacacaaatctcattcatgagggttcaacttttgtaatataatcacctcctaaaggctttgaccacctagtaccattgccttagggattaggatttcaacatttggatttggtgagggatgcaaatattcagaacacaggacacaccatctccaaagcctaactcattggtagactatggctgctcagttttctctaaggttaaaaagagttttattttggccagagcaattaggcaagagatagaaataaagggcttccaaatggcaaaggaagaagtcaactcagtctggttcacagatgacataattttattttcatttttattttttattttttgagacagggtctccctctctgtctcacccaggctggagtacagtggtgtaactgcacaccagcctcaaccttccaggctcaagcaatcctcctgcctcagcctcctgagtagttgggactacaggcccacaccattatgtctggctaatttttgtatttttcatagagatgggattttgccttgttgcccaggctggtctcgaactcctgggttcaagtgatccacccactttggcctcccaaagtactaggattataggcatgagccaccatgcctagccaatataatcttatacttagaaaaacctaaagacttcacctaaacattgttagaaataacaaagtcagtacaattgtgggatacaaaatcaacatacaaaaatcagtagcacttacataagctactgtaagtgggcagtaacaatctgaaaaacaaatcaaaaaagcaatctcatttacaatggctacaaagaatataaaatatctaggaaccaatatatccatagaagttaaagatatatatataaggaaaactataaagtactgattaaagaaattgaagaggacacaaagagtggaaagatgttccaggctcatgaattgaaatcattaatattatgaaaatgataatcttactccaaacaatttatagatccaatgcaatctcaatcaaaataccaatgacattcttcacagaaatagaaacaaaatcctaaaatttacatgaaaccacaaaagaccttacataggcaaagcagtcgtgagcaaaataaaccaaagctaggccaggtgtgatggcttgaacctgtaatctcagcacttcggcaggccaaggcaggaggaatatttcagcccagaaggttgaggctgccgtgagccatgatagcaccactgcactccagccagagtgacagagaaagaacctgcctctaaattttttttttaattaaagagaacaaagctggaggcatcacattacctgacttcaaaatgtactacaaagctatagtaaccaaatcagcatagtactggcataaaaacaaacacatacaccagtggaataaaatagggaacccagatataaatccacacatttacagccaactcatttttgacaaaggcaccaagaacataccttaggtaaaggacagtctcttcaataaatggtgctgggaaaactggataaccatatgcagaagaatgaaactagacccctatttcttaccgtatacaacagaactaaccaaaatagattaaagacttaaatctaagacatgaaactactggaagaaaacattggggaaactctccaagatattggtctgggcaaagatttttgtgtaagacctcaagaacacaggcaaccaaagcaacaatagacaaatgagattatatcaagctgaaaagcttctgcacagcaaaagaaacaagcaacagagcaaagagacaacccacagaatgggagaaaatatttacggctatccacctaacaagaaattaataaccagaatatataaggagctcaaacaactcaatggtaaaaaaaaaaaaaaattaaattaaattaaatttaaaaacccacacaaatgattcaattgttttaatgggcaagcaatctgaatagacatttctcaaaaaaaaatacatacatatagccaacaggtatataaaaaaatgttcaacatcactcattatcagagaaatgcaaatcaaaaccacaatgaattatcacaagtcagttaaaatggcttttattaaaaagacagggaatatcagactctgttgagaatgtggagaaagaggaacactcatacactggtggtgagaatgtaaattagtacggctattatggaaaactatatagaggtttctcaaataactaaaaactgctatatgatccagcaatttcactactgggtatatatacaaaagaagcaaaatcaatatgtcaaagggatatctgcactttcatgtttactggagcactattcacaataaccaaactatggaatcaacctaagtacccatcattgggcgaaaggataaagaaaatgtggtatatatacacaatggaatattgttaatctataaaacagaatgacatcctgtcatttgtaggaacttggatggaactagaggttactatgttaagcaaaataagccaagcacagaaaggcaaatatcacatgttctcattcttatgtgggagcttaaaaagtggatctcatgaagatgaaaataaatttgtcattaccagaggccaggaagggtgaggggaatgaagaaagctgggttaatgggtacaaatatacagtctgatagaagaaataggatctagtgtttgctagatcagtagagtgactatatttgtaaactatagcttacaatagtttattgcatatttcaaaatagctagaaaacaataatgcaagtgtttctagcataaataaaagacaaatatttaaggtaatggatatctcaattacactgatttgatctttacaaataatataaatgtattaaattatcacatatgccccaaatgtacatttttaaaaattaaaaattaagagaaaagtttaattttcaaaaacaaaaatattactgacacaattatgtataagaatgcatcaacaggcagttcaaaaaagtggaaatagaaatggtcaataaacatatgcaaaaacacagcctcattaaaaatggcaaaatgcaaatttttattaaaatgaagtaacacttattagatatatcggcaagaaaaaaaaaatcaagtttgggccaaatgcagtggcttatgtctgtaatcccaacactttaggaggctgaggtgggcagattgcttgagctgaggagtttgagaccagcctgggcaacacggcaaaaccccatctctgcaaaaaaatacaaaaattagctggacatagtggtgcatacctgtagtcccggctccttggaaagctgaggtgggaagatcacttgaacctggaagattgaggctgcagtgagcagtgatcgcaccactgcactccagcctgggtgacagagcaagaccctgtgtcaaataaataaataaataatcaagtttgatattatcaaatactggcaagaccatggataaaatagatatttcatgctctgctggtgggaatatatattggtgcagtaacctgtaagcggaatttgacagattctactgaaatgtttaaaatgcacactcaatgactgcattttaacctccatgcacacaaggaaaaatgtacaagcatattcattggaccattgtttaaaataggaagagatgttaagcttaaaatgtccatcaataaatgaccacctaaataaaccaggtccaactttgaaaaactaggcagctattaataaggatgagatggagccatgtattcttatctgggaagatctccaaattccattggtaggtgtaaaaagcaagttgcagaaggattcatcaggcatgccattttcttaaaagcatattttctactatatatatttaataagcacatatttatccattgaagtacattagaagtggcctgaaagaatacacactaagcaataattaccactggagaatacaggaagggtagcaacatgctgtgagcctcatttcttacattttacaaaattgaaaagccagttaagtagaggtcggataagagagtttctgtttgcatagcctatgccagaggttttcaaatgctaaatatggtcctaaaattattcaggaagataaagataaagatacagattttagaccaccacctccaggaactttgacttatgtacatataaagcaaagcctaggaatgaaatgtttaaaaagcttccctggtaagtataaagtgattggagccatgctgaaggtcactgttcccagcccagctaaaattaattcaacacatagaagagcagagaagcaaggataagacattggctatatgtgcgtgccttctactagggtagaaatacccagtgctattgctagaaagcacagacttgacttaccaattactaataaagccattctcacagggttaataagaattttggacagaaatatagctataattaagcattaatcatgctatattttgacccacttctttgtaaccaaaagtcacatagcactagatactcacaatttgcaaccctgtttttcctatagataggatttctgacattagattcataagacttgtttaagaattgcttaagcagactctgaattccagtggaatggctgatgccaaccagtttgaagacccccacagcagaactgaatcagcatgaaaacacattttttcatcttcctgggccatgatttcaccctgcactcttcgaccaatcaatatctccacacttcagccaactccaaaacccttaacaatcctagccccaaatttctcagggagatggattttaggtttactctcatttcctcattcagcaacccttcgcttaaacctctttctctgctgcaatccaatatatcagcacgttgacttgctgtgcacattgggtaatgggcatattacagttacacacacttattggtgcctgagaaattaacagagaatggggtagagcaagacggctgatagaggcttatactgttcatcctccacatagcaacaccaaattttaactactaactacacacaacaagcaccatcataagaaccaaaaatcaggtgagcaatcatagtacctgattttaactttatatcactgaaagagacattgaagagggcaggaaagacagcattgaagcactgacgccacccctccttcatcccccagcagcggccatgtagcacagagaatctgggtgcttgggagagggaaagtgcagcaattgtgaggcttttcattgaacccagtgctcccctgttacagtggaaagcagaaccaggttctactcagctgatgttcatttggcccagctctagccagagagaaattgtccatcccactggtgggagcttgagttccagcaagcctcattaccgtgggctggagtgctctggggcactaagtgaacttaagggtcagtctaggtcacaaggagtgcaattcctaggcaagtcctagtgctgagctgggctcagagccagtggactgggcaggcatgaaacctactgagacaccagccggggtggcttgggagggtgcttttgtcacccttccctcaccccccagcagtggccatgtggtgcagagaaatctttgtgcttgggagagggagagcacagcaaccgggggactttacattgaacttagtgctgccgtctcacagtggagacctggcaggattcatctcctgctgacaaaagagcccctaggccctgaataaccaccagcaatacccaggtaatacactatgggccttgggctctgagacatgctggcttcaagtgtgacccagcacattcccagctgtggtggctacagcgaaagatctttctgtttgagaaaaacaggggggaaagtaaaggggactccgtcttgcacttcaggtaccagctcagccacagtggggtggagcaataagcagactcttcaggtccccacgtccaagcctaggctcttggttagcatttctggacctgccatggaccagaaggaagcccactactctgaagagtgagtgtcaggtctggcagcactcatcacaagctgacaaaagggcccttgggctttaagtgaacatcagcggtagcctggcagaacccctcgtggggtgcttatggtggtggccacagggagagaaaagtgggaaggactttgtcttatggtttgagtgccagctttgctgcagtagagtagaatacccggtaaatttctaaggtatttgacttaaatccctggctctcagacaacatctctggaccaacctaggtctggaggaactcactgccctgaatggagggacataaatcagactggctttgccatatgctgatcataaagccctaggtcctagagtgaacttaggtggtagccagatagtagttacagcaggccttgggtggggcccagtgctgtgctggtttcatgtctcagccagcacagtcctggtggtggtggctacagggtacttgtgtccctccacctccagttccaggagactcagcacagagtcagggagagacgctgcttgtgaaaaaataagagaaaaaaataaaagtgtctgcctggtaatctagagaattcttccagatcttatccaagactaccagagcagcacctctatgagtctgcaagaaacataatattattggacttggggcccaagttccttcaaaatacccggaaagcctttccaaggaggatgggcacaaataagcccagactgtgaagactacaataagcgcctaactcttcaatgcccagacattaacgaacatctacaagcatcaagaccatccaggagaaaatgacctcaccaaacaaaataaataaggaaccagggaccaatcctggagaaacagatatgtgacctttcagacagagaattcaaagtagctgtgtcgaggaaactcaaagaaatccaagaaacacaaaacagaaattcagaattcttttttttttttcttgagatgaacgcccaggctggagtgtagtggtacgatcttggctcactgcaacctctgcctcctgggttcaagtgatcttcccacctcagcctcctaagtagctggaattacaggtatgtgccaccacacccaactaatttttatgtttttagtagacatggagttttgccattttggctaggctggtcttgaactcctgacctcaagtgatcagcctcccaaagtgctgcgattacaggtgtgagccactgcgcctggccaggaattcagaattctatcagacaaatttaacaaagagattgaagttattaaaaagaaatgaaattctagtgctgaaaagtacaactgccatgctgaagaatgcatctgggtctcttaataacagacgtgatcaagcagaagaaagaattaatgagcttgaagacaggctatttgaaaatccacagtcagaggagacaaaaagaaagagtaaaaaacaatgaagcatgtctacaagatatagaaaatagccttaaaagggcaaatctaagcactattggccaaaaagaggaggttgaggaagagatggggatagaaagtttattgaaagggataataacaaagaacttcccaaacccagagaaagatatcaatattcaagtacaagaaagttatagaacatcaggcagatttaatccaaaaaagacaacctcaaggcatttaataatcaaactcccaaaggtcaaagataaagaaaggatcttaaaaacagcaacagaaaagaaacaaataaaatataatagagctccaatacatctggcctcagacttttcagtggaaaccttataggccaggagaaactagcatgacatattttaaatgctgaagggaaaaaaaaaactttaaccctagaatagtatattcagcaaaatatatcttttaagcatgaaggggaaataaagaccttcccagacaaacaaaagctaagggattttcatcaacactagacctgtcctataagaaatgctaaaggaggccaagcgtggtggctcatgcgtgtaatcccagcagtttgtgaggctgaggcgggtggattgcttgaggccaggagttccagaccagcctgaccaacatggtcaggtgtctctactaaaaatacaaaaattagctgggtgtggtggcgcatgcctgtagacccaactacttgggaggctgaggcactataattgcttgaacatgggaggcagaggttgcagtgagctgagatcatgctactgcactccagcctgggcaaaagagtgagactccatctcaaaaaaaaaaaaagaaatgctaaagaaagttcttacatctgaaagaaaaggacattgatgagcaataggaagtcacgtgaagctacaaaactcactggtaatagcacacagaaagacatagaatattataacactttaattacggtgttcaaaatactcttaagcagaaagactaagcaatgaactaatcaaaaataataactacagcaatttgtcatgacagacagtacaataagacatgaagagaaacaacaaaaagttaaaaagcaggaggatgaagttaagagtttttattagttttctttttgcttatttgtttgtttatgcaatcagtgttaagttgtcatcagtttgaaacaatgggttatgaaacagtagttgcaagcctcatggtaaccccaaattgaaaaacatacaatgggccaggcacagtggctcacgcctgtaatcccagcactttggggggctgagacggacggatcgcttgatatgaggagttggagaccagcctggccaacatggtgaaaaccctgtctctactaaaaatacaaaaattagccaagtgtggtagtgggcacctgtagtcccagctactcgggaggctgaggcaggggaatcacttgaacctagaggcagagattgcagtgagccaagattgtgccactgcactccagcctgggtgaaagagtgagacttcatctcaaaaaatgacaacaacaacaaaaaactggactctttcatcattatataataaccttctttgtctctataggcggcagaaacaaagaaggtcattatataataatcaaggagtcagtttagcaagaagatataacaattatatatgcacccaacactggagcatccagatatatgaagcagcaaatattatttaaggtaaaaagacagccctcagtacaataatagctggagattttaacatcccactttcaccaatggacagatcttctagacagaaaatcaacaaggaaacatcaggcttaaactgcactatagaacaaatggacctaatagatatttacagagcatttcatctgaaggctgcagaatacacattcttctcctcagcacatggattattctcaagaatagaccatatgttaaatcacaaaacaaggctttaaaaaattcaaaaaaattgaaataacatcaggcatcttctctgaccacaatgtaacaaaacaagagatttggaagctataaaaatacacagcaattaaacaatatgcttctgaatgaccagtgggtcaatgaagaaattaagagggaaattgaaaaatttgttgaaacaaatgataatggaaacagaacataccaaaacctatggaatacagcaaaagcagtactaagagggaattttataattataggtatctacatttaaaaagaagaaaaactaatctaataatcataaataacctaatggtacgtgttaaagaactacaaaagcaagagcaaaccaaactcaaaattagcagaagaaaagaaataataaatatcagagcaggtggggtgtggtggctgacgtctataatcccagcactttgggaggctgaggcaggctcatcacttgaggtcaggagttcaagaccagcctggccaacactgtgaaaccccatctctactaaaatacaaaaattagctgggcatggtggcacgtgcctgcagtcccagctactccggaggcagagttgagagaatcgcttgaaaccaggaggttgcagtgagcctagatcatgccattgcactccagcctgggtgacagagtgagacttggtctcaaaaaaaaaaaaaaaaaaaaggatacatgaaggcctaagtggattttgagtttatctaatttattgttctctaataggcctagaatataaaataaagaaataggataatacttttttttgtattgcttctgaagtgatacaaatgaaattatatcttcctcagaccttctacaagctataaaaattcatagactatttgaaaataagccttgctactagtcttatcaaaaacttcaaaatgtttccacttctttgaagtgcaattggtggcatgaaaagaacccagaactagaagatgaagggcacaggtgggttttagccctggcttctttttttttttttcttttttgagacggagtttcacttttgttgcctaggctggagtgcacgatcttggctcactgcaacctccacctcctgggttcaagtgattctcctgcctcagcctcctgagtagctgggattacaggttcccaccaccacacccagctaatttttgtatttttggtagagacggggtttcaccatgttggccaggctggtctcgaactcctgacatcagatgatccgcctgtcttggcctcccaaggttctgggattacaggcgtgagccactgcagccggcctagcctagccctggcttcttttcttacaagttgtgtgtccttgggcatttatttaacttttctgatctgcagttttctttatctgtaaagtcaacagttgtaaagattaaatgagataacttttgaacagtgcttttcaaactagaaaacaccgcaaatatttgattataaggtaggtttgtccaagtcccaacagctgtgggaggactgaaaataaaagataaaatttttaaacttacaattgtatgtgctaaaggaagatggccaggatggtgaagtgtgcagtgaccttgtggttagaaatgtggttggaggaactaagactgttactctgaagcctgaacactggggttgcagagaggagaatcaatatttacagcctggcctggtgggaatcctactgtatgacttggcctttagcagtgtcagatttttaaaaatattcctgttttatttagaaatgagttatcacctcgccttgctcattttcctctcatctttacattcccttaatccaaaaaccaggaaggatgcaggcttaggtcttcagatgtctcaggctgatctctctgtgcttatagaatctttttaaggccacaggagaggtaggtgacatctggatgtagtctcaaaacaaagctcaacatgcatatcttggtggaaatctgaaggaaatggaacaggaggaaaatgaagacacaactttgaggcacatatggattggaagttgtctaatggaaggtctggatacctttcagaattctcagaggatatactttttaaggtataagtgactcatgacaggaggagtggagagctggtgaccaatttgaaaattgctcaggaatgcggattgatgtttggaacatcaatttccatagtttatatactttctactattcaatcaaattaagattgatgtttggaactccaatttccacagtttctattgcttctcttttctcataatagtctttctacctctttttatttaaccaaataagacacagtgagtttaatgaattttgggttttttttcccccagttgggaagatctgtcaatatttcataggcaagcaaaaagaggcactaaaagggacctattaaaatattttagtcacttctgaagatccaaagacaggttctttttttgcaaagctttattctctttttatgaattcctctttttgctgatttgtcttttatttctttccttttttttttttcttttgagacagagtttcactctgtctcccaggctggagtgcagtcgcatgatctcggctcactgcaaactccacttcccgggttcaagcggttctcctgcctctgcttcctgagtagctgggactacaggcacacaccaccatgcccagctaacttttgttttttttatagaaatgggatttcaccatgttggccaggctggtctccaatgcctgaccttaagtaatccacctgcctcggcctcccaaagcactgggattacaggcatgagccaccatgcccagcctgatttgtcttttgtgattactcaaagatcaagcagctcatactatgtacatcagttttacagacctggcaaggtagccctttggcttgccttcatagctgtgaacctgcaattaagtcatcaaaaattttcagcctgctgcctatttacaatgtaaacaagtgattgctagtatcaagctatttgtgaatacagaatttttttttcttttttcagagggagcgtcgctctgtcacccaggctggagtgcagtggcacaatctcggctcactgcaacctccgcctcctgcgttcaagtgattctcctgcctcagtctcctgagtagctgggactacaggcatgcaccaccacatccggctttttgtatttttagtagagacggggtttcaccatgtcagccaggctggtctcgaactcctgacctcaagcaatccacccaccttggcctcccaaagtgctgggattacaggcgtaagccaccgtgcctggcctgaatacagaatttttgaaacatttctttggctaaaacagcatttttaaataaggaaatttgcagagttgaggtttcattagagacatgaagatttaatttgagttgtaatttttgacatcattaagagtgaagcaaagtttttcagagatttgagctatttcattgtgttgacaggtgtaatgattagagcatcataatctacatggatgtggcttcactaagcagaaaatataacattttgtataattagaagtttgctgttttgagtacatcttcttccatctatttatactcacaagttcaccagggaaacactttccctccaaatgcagtggggtagatatgagttgctctacatacttgggtgtatgagttgtcacctcatctatatgttctaaaattacctctgattcttaacctcgactagccaaagcagtgagaaagtccatttcggatatgttttgggaaatttcccccttttgttagggtcacctaaaaatccaagttgaagactctacttccaggtataatttctatggtttattactggaaaagtttctctaaatatgtggatcgctggaaataagaggaagcacagggttctccgagtgaagctggcttttggaattacttggctgcaactgtcatttgctactttaagattttacttattgatttttttttttgagacagagtctcactctgttgcccagtctggagtgcagtggtgcgatctcagctcactgcaacctctgcctcccgggttcaagcgattctcctgccatagcctcctgagtagctgggactatagtcatgtgccaccacgcttggctaatttttgtattttagtagagacagggtttcagctgctctgcctatggagtagccattgttttattcatttaccttaataaacttgctttttttttttttttaaatgaaaaccgctctgttggccagggtggtcttgaacttctaaccttaagtattccacctgcctcagtctcttaaagtgctggaattacaggtatgagccactatgctcggcctgccattttctattgataattttcttcgcttccttggggagagtaaaagggagagaacacagtctgagtagttcctcttcaaaataagctgggcgcagtggctcacgcctgtaatcccagcaatttgggaggccaaggagggcagaacacctgaggtcaggaatttgagaccagcctggctaacatggtgaaaccccgtttctactaaaaattcaaaaaattagctgggcctggtggcgcttgcctgtaatcccatctactcaggaggctgaagcaggagaatcgcttgaacccaggatgtggaggttgcagtgagctaagatcatgccattgtagtccagcttgggcaacaagagcaaaactccatctcaaaataaataaataaatacagaaaatataatcgaagttgggaagggtcgttgtcctatccagccagtggggcggggcccagtcttaactggaagcattgggtttcattgcctcagtctgctctgctacaggactttgttactcagaccagccctccctgcccttgcacagggattctttcagcaggctgagggacactgttcccatggtatgtccgtaattggtgggttcttggtctcactgacttcaataatcaagctgcagaccctcatggtgactgttaacagttcttaaacatagtgtgactggagtttgttccttctgatgtttggacgtgttcggagtttcttccttctgctgggttcctggtcccactagcttcaggagtgaagctacagacattcgctgggagtgttacacctcttaaggcagcactggagttgttcattcctctcagtgggttcatgatctcactagcttcaggagtgaagctacataccttcaggtgagtgtcacagctcataaaggcagcaaggctccaaaaagtgagcagccacaagtcttattaggaagaacaaaagaacaaacctgccacaacatggtagacgacccaagcagattgccgctgctggctctggcaccctgcttttattcccttatctcactccacccacatcctgctgattcgcccattttacagagagctgattggtccattttacaaagagctgattggtctgttttatagagagctgattggtccgttttgacagggtgctgattggtgcgtttacaatccctgagctagacacagagtgctgattggtgtatttacaatcctctagctagacataaaagtgctccaagtccctactagattagctagacacagagcactgattggtgcatttataaaccttgagcttgacacagggtgctgattggtgcgtctacgaacccctgccccccaccaatgctagacacagagtgctgattggtgcatttacaatcctccagctagacataaaagttctccaagtccccactccactcaggaacccagctggctttgcctagtggattcccgccccaaggctgctggcagagctgcccaccagtgccccgccatgtgcccgcactcctcagccgttgggcatcgatggggccgggcgccgcggagcagggggtggggagggggcggggcggcggggctccggggctcgcgcatggcgggctgccagtcgccagccatgggagtcgggggagccgggggaggaaggcagctgaggcccgacgagaattcgagcgccgacccggtgggccagcactgctgagggacccggcgcaccctctgcagctgctggcccgggtgctaagcccctcactgactggtgcggtggcgccggccggccgctccaagtgcggggcccgccgagcccacgcccatccggaactcgcgctggccggcgagcacggggcacggccccggttcccgcccgcgcctctccctccacacctccctgcaagcagaagggttcctcaagcgcggccagagtggacaccgtggcttgaggaggtgccgagagcgaggcagggctactagcatgttgtcacctctcaatgggtctctccactgaccactgcctcagcccacggacactctcgctgtggttcccaaggtatctgtgtccccggcctagctctctggcttcctgaagccatctcttactggtgctccatgcatgcaaaccttgggcctcttatcactctcagaggctccttcttcttgtctttctctagtcttggagaaatatctcttaagtttcagcatcagcttcttctctttcccctttatagacttctatctcacccacctgcaaaagaataaacagtgtgaggggccgaaatgtcactccttacaccacacctcctaaacagagaagacaaaacataaatgagtgtctcccgtaattgcccctcacaccagtattattttgcatcgtgtcttttttgtcagaatctatgaggtttttgtttgtttaagttctctctctgtcacgcaggctggagtacagtggcacaatcatggcttactgcaggttccaccccctggtctcaagcaacccttctgcctcagcctcccaagtagctgggactataggtatgcaccaccacacttggctaatgtttaattttttttgtagagacagcatctcaatgtgttgccaaggctagtcttgaactcctgagctcaagtgatcctcctgccttagcctcccagggtgcttttcctactagataccctacataccttcttgctagatcaaaagcagacaagaatctgcttttgatctagctggaaggtatgtagggtatctagtaggaaaaaagctggcttcagagctgtgagtcctgccaggggctgggaaaaggtggaaaggggagaaactgcttagtgggtaaggaattttactttggcgagatgaaaatgtttctggaattcgatagaggtgatggttgtacaatattgcgaatatactcaatgctatggaattgtttacttttaagtatttatgttatctgaattttacctcaataacttattaaaaaagaaaaaagcaatgagtcctcatgctggtgccatggggcttattggtacgagagtacactgggctaaaaagagaacccacccgtctcccgcagttggaagctaaatgaccttggtcaatttccctaaccccagttttctcatatgtaagctggggataataattctcagttggcaaggatgctgttagggcaaaattaggtcatttgtgagaagcaccaggcacagtgtctggcccattgagggggtcacttcttcatagcacccaatctctgcttcttaggcagatgatctaggttctgccaatgcctcatgtttgacctgttggctttggggaatgagtggaaatgtcatcagctgaggttgaaagagaaagaggttctcattaggtaagaacactggtttgggacatgctgaatttgagacgattgtgagacataataggtcggaagctggagtctgaggctggcagagatggcagtcagactggacattgagatttcagtcatccagtatgtaggcagccactaggaccctgaaaaaggacttggcccaggggagattggagtgaacaggtagagggcttgaggtgaaagactgggaaatatcatttaagggttaggtgaatcctgtactcatgaaggttattcaaccctatctgtccacaggcttaccttgtacacctctctgtctctgctcactccattctaacttactctgttcattcatctttccagatttctatctacagagcttttccagtcttgatgtctgcttggtttgtttctctgcctcttgactcagtgcttcattctctggctagagcacaaatttacccatcctggttccccaagttcctttcatccagcgtggcatcaaggaagtctgttcatgataaccaggtccagtgtgctctcataattgatctccaaagagcagtgctttctagattaattctcagctgggtcttgtctcttcacacttcactttttttttgagatggagtctcactctgtcacccaggatgcagtgcagtggcgcaatcttggctcatggcaatctccgcctcccgagttcaggcaattctcctacctcagcttcccaagtagctgagattacaagcacgtgccaccatgtcttgctaatttttgtatttttagtagaaatggggtttcaccatgttagccaggttggccacaaactcctggcctcaagtgatctgcctgcctcagcctcccaaagtgttgggattacaggtgtgagccaagatgtccagactctttacacttcatttctaacatgccaggtcctaccctcttccttgcttaccttggcacctggatttccctgattttgaactgattatttggctcttgattcctggccttactttgtctttgtggatatttgtttgttctgtctgttttaattcagcaaatatttattgagggcctactatgtgccaggccttattttagggtctaggaatacagcagaaacaaaacagaacaaaatccctatgtttgtggaaagtagatggggaaaaaaaaagcgggaaagtgggataaggagtgttgaggagtgagttacaagtttaactagggtggtcagggcatcctcccactgagaagttatcattcaggacagaggaaagagccagtcaaaggccttgaggcaggagcatacctggagtgtttgggagcatcaaggaggccaggatggctacagcagagaaagtgctaaggagggttgtcaaggagagatcagcacagtacaggtggtgatgaggacattgtttagggtcctacaagccactgtaagaaaatcagcatttcctatgagtgatggggagcctctggagcattttggggatcagtctggctttgtggagacccagtcatccagcttcctacagtccacttccaggcttgcctccacactttttttttgtttgttgttcggttttaattcatgtcattgtacccagagaaaatgtttcagctggaccctgcttcagttctacttctaataactatgcctcaattcacgtgtcacttggaaagtaaatgaagatggtattactgattcaatcatccgtcaaatagacatataattataaacttagaaaagtgctatcaagaaaaattgcatgagggcataccaaggaatgccaagaattgctggcaactaccggaagctgggagagttcaggaatgattcttccctagagcctttggagagagtgtggccctgctaacaccttgacttctagctccagaactatgagacaacaaatttctgtggttttaagtccctccacacccacacccagaagtacatgatgtttggcagtgcatcatggggaaagagactgggtaaacaaggcagagtccccttgagaaagtaccttgaaaaaaaagattttactgtttttttaagagacagggtctcataccatcacccaggctggagtgcagtgccatgatcatagctcactgtagcctcaactcccgggttcaagtgatcctcccacctcagcctcttgattagctggtaacccaggtgtgtgccaccacacccagctaatttattaaaaacaaggtttgaaggatgagtaggagttaggtaagtgtgaatgggggcagagggatatgtttttgcatgtagaccagtatctacaaaggccctagagcagagaaaagtgaggccaattccattaaaggaagaaaggctagtgtgaggttgaagcaccaggttgggaagagaggcaagaattgagcatggggaggtgacaccatgtaaacagttgtgtttttagcatttggcagtgaatcttttagcgttaaatctgtgaatatgtttcctgactgtgaccgtaaattttttgtgtcaacttgactgggccatggggtgctcagctatttggtccaacttgattctgggtatgtctgtgagggtgtttctggatgtgattaacatttgaattggtagagttagtaaagcagttaccctcctccaatgtgagtgggcctcctccaatccagtggaggcctgaagagaataaaaggctgagtaagaaaggatgctctctctctctgcctgtctttgggccaggacattggttgtttcctgcccttgacctcaggctcaggctggatgtataccatcagctctcctggatttggacttctcagcctccataactgtgtgaatcaattccttataataaactaatttctctatctctgtttttctacatctctgtatccatacgtcctactgattctgtctctctggagagccctgattaatcctgaccaattgacataagcaaacagagagattatcaatcaaactgtgtctggaattggtgggttcttggtctcactgacttaaagaatgaagccgcggaccctcgcggtgagtgttacagctcttaaggtggcgcatctggagtttgtttcttctgatgttaagatgtgtttggagtttcttccttctggtgggttcatggtctcgctggctcaggagtgaagctgcagaccttcgcggtgagtgttacagctcttaaggcagcgcgtctggagttgttcgttcctcccggtgggcttgtggtctctctggcttcaggagtgaagctgcagatcttcgcggtgagtgttacagctcataaaggcagtgtggacccaaagagtgagcagtagcaagatttatttcaaagagcgaaagaacaaagcttccacagtgtggaaggggacccgagccagttgccattgctggctcgggcagcctgcttttattctcttatctggccccacccacatcctgctgattggtagagccgggtggtctgttttgagagggtgctgattggtgctaggtttacaatccctgagctagatacaaaggttctccatctccccatcagattagttagatacagagtatcgacacaaaggttctccaaggccccaccagagcagctagatacagagtgtcgattggtgcactcacaaaccttgagctaaacacagggtgctgattggtgtgtttacaaaccttgagctagatacagagtgccaattggtgtatttacaatctctgagctagacataaaggttctccaaggccccaccagagcagctagatacagagtgtcgattggtgcactcacaaaccctgagctagacacagggtgctgattggtgtgtttacaatccctgagctagacataaagactctccacgtccccaccagactcaggagcccagctggcttcacccagtggatcctgcaccaggccgcaggtggagctgcctgccagtcctgcgccatgcgctcgcactcctcagcccttgggcggtcgatgggactgggcgcagtggagcaaggggcaacgctcgtcggggaggcttgggccacacaggagcccacggagggggtgggaggctcaggcctggcgggctgcaggtcccgagccctgccccgagggaaggcaactaaggcccagtgagaaatcgagtgcaacgccagtgggctggcactgctgtgggacccagtataccctccacagccactggcccaggtgctaagcccctcactgcctggggccggcagggccggccggctgctccgagtgcggggccgccaagcccacacccacccggaactccagctggcccgcaagcgccgcgcacagccccggttcccgctcgcgcctctccctccacacctccctgcaagctgagggagccggctctggccttggccagcccagaaaggggctcccacagtgcagcggtgggctgaagggctcctcaagtgccgccaaagtgggagcccaggcagaggaggtgccgagagcaagtgaggactctgaggactgccagcacgctgtcacctctcaaaaccatatcggtatctacgttcagagcctacattcaggctcttcctttatccagacagcacctagatatttctttggggaacctacttctccctgcctagggaatttgtagtagtcaagtgctttgagtagtgttgtgttagtcaattttgcattgctgaaaaagaatacctgagattgggtaatttataaaggaaagaggtgtatttggctcatagttctacaggctgtacaggcatggcaccagcagctgctcagcttctggtgtggccttaggatgttttacttgtggcagaaggctgatggggagcaggtgtgtcacatagcaagaaagggaacaagagagagaggaggaggtaccagtttccttaaacaaccagctctcatgtgaactaatagagtgaaaactcattcattacctcagggcaggcaccaagccattcatgagggatccacccctgtgacccaaacacctcccaccagactccacccgcaacactagggatcacatttcaacatgagacttggagagaacaattatccaaaccatatcaagtgtgggctatgcctgtagccataagcataggctttgattgttggaagtcaatcaatattttctggaggcttcatagtggtccctagtaatgtcatctcttttctaactagattctgaacaatcagttgagagataaaccagagtaatatcaaggtcccaaacagcacttttattgccatacagcaatttgaaccagctagaacacatggttcaaatctgttaaacaagtggactcaactccaaataatgcagacctaggcacccagtcataggccgtgatggactttgataggtcctgctacatggattaacagaagagaactcctcttctctgagggaagttccccaaatggaatggcagttctgcctttccaaaagaaaactgtgtagagcattctcagttaagttttacaaaattatcaatcagatgggttgatatatcttgccagagccagagaggctagagttacactaattgagacaacattaggcatgagaaagaagcattcttcataaaatatgctagttcatccttcttgccacagtgattggttcaaagataagtagtaactcaggtctaagcccatagaaattccctatcctggctgggcacagtatctcatacctgtaatcctagcactttgggaggccaaggcaggagaaacacttgagcccaggagttcaagaccagcctgggcaacatagtgagacaatctctaccaaaaattttaaaattatctggacatggtggcacccgcctgtagtcccagctactcaggaggctgaggaggaaggatcacttgagccagggaggccaaggctatagtgagctgtgattgcaccactgtagtctagcctgggtgatagagtgagaccttgtcaagagaaaggaaggaaggaaggaaggggggagggagggaaaagaaaaaggggggggaggaaggaaggaaggggggagggagggaaaagaaaaaggggggggaggaaggaagggggaggaagggagggagggagggagggagccgggcatggtggctcacacttgtaatcccagcactttgggaggccaaggtgggcggatcacctgaggttgggagtccgagaccagcctgaccaacagggagaaactctgtctctactaaaagtacaaaattagccaggcgtggtggtgcatgcctgtaatcccagctttttgggaggctgaggcagaagaatcgcctgaacctgggaggcggaggttgtggtgagccgagatcacgccattgcactccagcctgggcaacaagagtgaaactccgtcaagaagaaagaaagaaagacagggagagagagagagagagagagagagagagggaaggaagggagggagggagggaggagggagggaggaaggaattccctagcctcagagattggtccagattgccccaatcagaatgaagtgccagtgtttgatactagaaaggggcctttggagggaagacttcttgttgttaaacactttgcttccatgaggtaagttagcctgaggaggaagctgacttgtggaggagagcagagctgtgaaaaaaagggaaatactgagttggagtcctgatcaaaacatgcctgacatgttccttgggttttttttagttacatgagccaataaatgttctttaccatttaagccagcttaaattaggttttcttttactgtaaccagaattcttctaaaagatacacttatacctcatctattttaaaaccagactcaaatctcatcacctctaagaatgtttccataatcaatcctatgtacctttatattacacttgcctggggctgagagttctgggttacctagtgtatactgtaatttttttgcactattatcacttattagtgttttcatggtatatattttctcttttttctttcagtctgtgtccttagagtttcttgtgaacagcatatagttgagtcttgtttttgttaaaatttagtttgacagtttccactgtgatgttattctatttacattaaatttgctatagatatgattggtttaatgggccctatatgttctttgttattcctttgttgcttgtttacaaattaagttaaggagaaggagaggaggaggaggaagaggaagaggaagaagaagaagaaggaggaggcggtggcagctgggcatggtggcttatgcctgtaatcccagcactttgggaggctgaggttgaaggattgtttgaggccaagagttcgctaccagcctggtcaatacagcaagaccctgtctctattaaaaaaaaaaaaaaaaaaaagttggctgggtgcagtggctcacacctgtaatcccagcactttgggaggtggaggcgggcagatcacgaggtcaggagattgagaccatcctggctaacacagtgaaacgctgtctctactaaaaattacaaaaaataatattagctgggtatggtggcaggcgcctgtagtcccagctactcgggaggctgaggcaggagaatggcatgaacccaggtggtggagcttgcagtgagccaagatcactccaccgcactccagcttgggcaacagtgtgagactgtatctcaaaaaaaaaaaaaggtaaaaaaaagtaaaaattaagaattattcactattctcaatatatcagtattatatattatatgttacataaggattattcagtattcatgtatatgtgtgtgtatatatatatatatgtatgtattagagatggggtttcactttgttgcccaggctagtctcaaacccctggtttcaagtgatctgcctacctcagcctcccaaagtgctgaaagtataggcatgagccactgtgcccagccagtattctattttatcttacctattgtttttctagtaatatctcttggtatttttttagtggttactaaagattacaatatgtgttcttaccttttccttattttatcatttcataaacaatgtaagaaacttactacagtataattttattacccttctgcccttgtgcaaatgtcatgtattttttcattatcgattattttgctattctatttgctttaaatggtcaatagtctcctaaagaaagtttctaaagagtactttatgttttttcacatctttgcccattctggtggcgttcacagattcctggagaaaaacttcgttgagtgttactcataatgctggtctgcaagtgacaatttttttctgtttctgtttttatttagctttcatttttaaagggtgcttttgaaggtatagatttctaggttgacaggttttgtttgtttgtttgttttccagatgtcgttccatcattttctgtcttccgttttttttctcttaagaagttaaccaacattcttatttttctattcataagcataatagatcctttcccctgccctggcttcttttaaaatatctctaggtatagttttttttttttaaatctagcttagtgttcactgtgattattggatatatgggttcatatctttcatcaattttagaaaactcttggccactatcttttaaaatatttattttgccccagtttctcctctgttcctggattccaattacctgtatgctagatatatggtttgaatgtgtcctccagagttcacgtattgaaaacttaatccttggctgggcacagtggctaatgcctgtaataccagcactttaggaggccaaggtggatggatcacaaggtcagaaatttgagactagactggccaacatagtgaaaccccatctctactaaaaatacaaaaattagctaggtgtggtggtgcatgcctgtagtcccaactactcaggaggatgaggcaggagaaccgcttggacctgggaggcggaggttgcagtgagccgagactgtgtcattgcactccatcctcagtgacagagtgagactctgtctcaaaaagaaaaaaagaaaatagaaaacttaatccccaatgcaacaatgttgagaggtagaatatttacaaggtgattaagtcgcaagggctctgcccttgtgaatggactaatataatcatgagagtgggtttattatagtgagcattagtttatgaggaaatcaattttagctctctcactctctgtcattctcatgcatatacctgctctcttgccctttcaccttctgtcatgaaataacgcagcaagaaggtcctcaactcatgcaggcctttcaaccttggacttcccagacttcagaaatgtaagaaataaatctctgttatttatacattatgcagtcatgggtactctgttatagcagcataaaacagactaaaagacaactcagttgcctaatatttacttttagtctctgattctttgttccccatttttgttttcctcattcttttattctgttttcaatttgaataatttttactgacctatcttgcagttcacttattcttttttctgctatattgatttgttattaaacttatacaatcaatacttcattttagatattgttatttttttagttcattttcttattttagctgagattctcttatctcttgtttcactcatctttttatctaaattgtttaacatatttgtaatagttatttgaaaatttttgtctgctaattctaacactagggttacctgtgagtctgcttttattgagttttttttcttttcattatgggtcatatttcccccccttttttttacatattttgcatttcttgttttagacttccgtgtgtgtatgagtatttataaataatatttaccaccaccacccctgctccccactgcaccaagatgattccctttcctctatcaggaagctaggtttggttgggggtaatctcttcagtctaatcagaacttggggttgccacttttgttgatttcagttcaatccacttatggtattgtatgtcttaggcatgatccagtttcttttctctgatagggctttgaaattttagcatcatgagatccctatgctttccagcccagtcatcagtttcttgtttcacgagagtcaagcaggtaattttaacaagtaaagtcagccagatggggactattgtgatctggagggcagggggaaccacaaatcaactctattctactgacaccattcaagaatttgagtcctggttgtcagattttccttttcttttctaaaagaatcctgaaattcagatccttatgtgtatttcccagtattttctgttggctaatcatttaaaaatctttcaaagcacagctcaggcctgacaaaatatatctttttccttaattcagtccatggaccactagttttcagtctccaatgtcatccagctgcttcgtgttaggtaataaggcccaaacagtacttaacctaactcagttcagaaaagacagcttcctacaaaaaattagccaggtgtggtggtgcgcacctgtaatcccagctacttgggaggctgaggcatgagaatcacttgagcctcggaggcagaggttgcagtgagccgagatcgcgccactgcactccaggagcctgtgcgacagagcaagactgtatcaaaataaataaataagtaaagtaactaaaaataaataaaaagaaaagaggacttcctgaagctaagaaaaatcaattcttaaaagttaatacaattttaaatttgattgccagtttattataagatgttttaatcagatattttgccaaagttagaaagggctaggatcatgcctgtaatccgaacactttggcagcccgaggtgggtggatcacttgaggtcaggagtttgaaaccagcctggccaacatggtaaaaccccatctctactaaaaatacaaaaaaattatccaggcatggtcgtgggcacctgtattcccagctacttgggaggctgaggcaggagaatcgtttgaacctgggaggcagaggttgcagtgagccgagattgtgccacttcactccagcctggttgacagagtgagatgccatctcaaaaaaagaaaaaaaaaaaagaaagaaagaaaagaaaatataaaaacagttcatccagtagaatgagacatggtggattaattttagaggacagttatgtctaagtgtagattttccactgcaaagacagatgtattagtattatctccagataattaaggaaatagacaaaacaactcaaacatacaagttctaatgtttttatcacacaaacatatacgaattttgccctgtattcttggagaaacacaaccattttctccctacaacttgcttctctagcaataggatctgccagagaatacagctatgagtatgttttccaggaaaaatttgttgtattttaaattgacaattttttcatcttttcatatgaaagccttatttgctatttatagaggcctattgttttagctgcctacctggttggagtgacaaagaaccagcttttcttgctgaaaactgaactaaaccattttaatactcctgcttccctagacaaactttttctaaataaacataatcatgggtgctgggtgttttattttgtaattaaagcctaaaatcatcccttgtcttatattcctcttcacatctatacatatactcatccttttctacctccctcatgcacagaaccacaaatttacaactgactgaaatgaatatgtttcatgatgtatttatttttctctccaagttctgcaagaaaaactgtctagaagccagtgaccattaataactcctttcttgccaagtagctactggtatttgttcaaaacatattcatagcttgccactctaacaacttggaaagtagtttaaaatcactaccatccttttccatcccacagcaattttgcatttcagtgcttcactggacatctcaggaataatcaataggactcagattttcctcttaacttgtagggtagaactttgattggtagggatgtcaaatcttggaaggtttgactaaaccccacttccttctccttcccctcaatgtgggcatccctaagactctgtccttttcttgctcctaattttcttcctcagagctctcacctctcccgtgggatcaatgattcctttcataaagatggttggtagaactatcatcttactatgtttgtgttcttatatgtaacattgtgtattttatatataacataaaatgtactattttagccattttaagcatacatttcagtgacattattgtgcaaccatcaccaccatcacacatctccagaacttttatcttcccaaactgaaactccatcccattaaacagtaacttcccattccttccttctccaagcccctggcaaccaccattccactttttgactctatgatttttttttttttttcagataaggtctcactctgtcacctaggctggagggcagtggcgtgatctcagttcactgcaacttctgcctcccggattcaagtgattctcctgcctcagcctcccaagtagttgggattacaggtgggtaccaccatatctggctaacttttgtatttttattttatttatttatttatttttgagatggtgtctcactcggttgcccaagctggagtgcagtggcatgatctcggctcactgcaacttccacctcccgagttcaagtgattttcctgcctcagcctccagagtagctgggattacaggcgcctgccaccatgccctgctaatttttatatttttagtagagatggagtttcatcatgttggccaggctgatcttgaattcctgacctcaagtgatccgcacgtctcggcctcctaaagtgctgggattacaggcgtgagccactgtgcctggccaaagtttcttttctaacatctcgtataaagacttctcttctaagctccatctccacacttccagctgtagtggatacttttcttagttgtgctatggctgatcagtccttctgtatgaaactcctactcctcagtaactcaggcttaagaaatataaggtagcttttacttttcatctcttttattgtcattattccaacttagactcttaatatttttacctctacctccaattcatactgttctatcttgctaaactaaacttaaaatatcttctgtcactttcctttccaataccctctagcttattaaataatttctaaaattcttagctaaatgtcagaggccctcttgatctattccttactcttagtttgtttggaatactataacaaaatatcttagactgggtaaattataaataagagaaacgtatttttccacagttctgaaggctgggaagtccccgatcaaggcactagcagatttgagtctggtaaaggcttaccctctggttcatagatgacatctcttgctgtgtcctcacacggtggaaggggcaaactctgtgtcctcacatggcagaagggcaaaagtgggaacaaatgctgtgccatcacatggcagaagagatggaaaggccaggaagctctctaatggacttgtaaaaggccattattaattccattgtttgagagttaatcactttcccaaatgccccacctcttaataccaccacgatgaggattaatttttttttttttcaacctggagtttcactcttgttgcccaggctggagtacaatggcacgatctcagctcactgcaacctctgcctcccgtttcaagcgattctcctacctcagcctcccgagtagctgggattacaggtgcatgccaccacggctggctaagttttgtattttcagtagagacaggggtctcaccatgttggtcaagctggtcatgaactcctgacctcaaatgattcacctgcctcagccttggaaagtgttgggattacaggcatgagccaccgcacccagccggagattacattttgacatgaattttggagggatgcaaatattcaaaccacagcactagccgacatttttagtttccatatcagttgattaatctcaacagagtcaaccatccactccactccatctgtatctattaaactcattaaatgccttgtgttttcctgcctgaatatcttggccatgcgatttcctatatctggacagcctttctctctctcttcactatctcctcctacacatcttcctgtggattgcagcacacactgatgtctctcttttctctctttagtaattattgtaaatctctcttttacttcttagcaaataactgtcttggaattatttttccacttttctatgtcttagtttccagctagattgtacattcctggagtcagggactatgtcatttacttattcattccatagtgactgagtacctctggaatgtttttggccctctgctggggttacaaattggtttgtggtgtgctcactgcttttaagttgctcacatggggatatagacacaaaggcaaattattgcaattcaatatgataatggctttagtggagccacagacagaaaaagaatagctaaccttacctaggggaactgaaaagggcttatacttgacatttccacattgaccaatgatcccctaaagaatcacataaattccttgtaggtgataactcatgattttcacaattgatttttctgtcactctagagaaaccattagtcttttcatgaatttgtctgcagtattcacatgtgtggatgtttttaaactaccgaatgttaggaaaaattgtcaggccctaatgaattagaattttttttgcaattcaaatttacaatgggtacatatagacccctaccttgaagacggtgttccaggagtcaggaaattgctgcagtacatggtctacttcccaaagcctggatgattggtgaagaatggatgtctggagaataaagtgatagtattcaaggccaggcacagtggcttatgcctgtaatcctagcactttgggtgattctcttgagcccaggagttcaagaccagcctgggcaacatggtgaaacctcatctctacaaaaaatacacacacacacacaaaatagccagggatggtggcatgtgcctgtgatcctagctacttgggaggttaaggtgggaggattgcttgaggccaggagttggaggctgcagtgagctatgattgttcaccgcactccagcctgagtgacaaaaagagatcctgtctcaaaaaaaaaaatacataaaaataaatacataaaataaaaatagaataaaaagaggatactattcaggtaacacccagtactcaaaagaaaagatggtaaaacttttaaagattatgttatttttgatggggggacgtgtcttagtgcattcctgctgctgtaataaaatgccacagactgagtaattataaatattagaaatttatttctcctagttttggagactggggagtccaagttcaaggctcagacacatttggtgtctggtggggacccactgtctgtttccaagatagcgccttgttgctatatcctccagagaggatgaacgctatgttcttacctggtggaaaggattgtaggataaaagagactaagatgctgtcttcaaccttttttataagaacactaatctcattcctaaggatggagtgcttatgacttaattgcttcccaaaaggcccccacctcttactgttatcacattgggtgttaggttccaacatgaattttggagaaaaacacacattcaaatcataggcaagtgggaatcttatatgtagatattttcatttctcttcccttctcataaggtccatacctcaaagcctgctggatgtcgctgatttcatgtgttaaagaaggaaaaccctttcctgcctctgaggacttttgcctagagttcagttaattaggaaaggggaaaaactagtcttgagaatctgcccctaatgggatgacatcccagctctttaacgctgcatctatgatattcctcacctgtacatccagttaaatgagaccatttattgctttattcaacagttacttgttgaaggtctattgtctgccagaggctcagagtaaatcactgttagtccatttgtgctgctataacaaaatatccaaaactaggtaatttataaacaagagaaatttatttcttacagttctagaggctgagaagtccaagattaaggtgctggcagggtcagtgcctggcgagggctgctctctgctttcggatggtgccttgttgccgtatcttccagaggggatgaataccatgtctgcacatggtggaaggacaaaaaaggggctctgcaactcacttgagctttttttataaggagatttatcctattcatagagccctcatgacctaatcacctccccaaagccccacctcttttttttttttttgagacagggtctcattctgtcaaccaggctggaatgcagtggcatgatcatggctcaccgcagtctcaaaccgaaacgatcctcttacctcaatttcctgagtagctgggactacagatgtgcaccattatacctggctaatttaaaaaaattgtttttgtagagatgggggtctcactatgttgcccaggctggtcttgaactcctgggctcaagcaaaccttccaccttggcctcccaaaaaatgctggaattactggcatgtgccaccaagcctggcccaagccccacctattgatgtcattgccttaggggttaagttccaacatgaattttggagggacacattcaaaccatagcaatcacaggaatggtgtttacctttttggagccgacacagataaaatagagtcacaaacaagaattaattagaaacagtgataggttttatcaaggaagcacaaatgtcagcaacagagaaaaattaggtaggactctctgtgtttgcccagagaagtgtgttccaaggaggtgacattaaagttggcagaaagatgaggaagagccaggcagccttagagtagagggagtgtcccaggaaagagagaactgtgtgtatgagagggtcccaggatggggggacagggagagaggagggctggagagcactaaccccatctaactggcagggatatgacatgggagttaaagagtacagactcaggaaccagattgacctggttcaagtctccactctgcctctgctaacgctgtgatttcatgtaagcttcgagttcaatttttcagttgtctcatctataaaatggaggttaaacataatacttgtctcatagggtttcaggagaagccataaacccactttttaacatgaactctcccaatttttaaattttggtcacttatttggaaagattaaaaaaaaaaaaactgagtaaattgacagggcccagtggctcacgcctgtaatctcagcactttgggaggcagaggcgggtggatcccttgagttcaagagttcaagagttcaagattagcctgggtggccaggcgtcgtggctcacgcctgtaatcccggcactttgggaggccaaggcaggcagatcatgaggtcaggacctgcctggccagcatggtgaaaccccatctctactaaaggtacaaaaaactagccgggcgtggtggtgtgcaccagtaatcccagctactcgggaggctgaggcaggagaatcagttgaacctggggtgacagggcaagactccacctcaaaaaaaaaaaaattagcctgggctacatggcaaaaccccgtctctacaaaaaatacagaaattagccaggtgtggtggcatgtgtctgtggctgcagctacttgggaggatgaggtgggaggattgcttgagccggaaaggttgaggctgcagtaagctatgatggcgccactgcactcaagcatgggtgacagagtgagaccctgccttgaaaaaaaacaaaaacaaaaaaacccaaactgagtatttaactccatttgtgaactctttatgacttggggggggtcactagtttacagtcttttatttggtgcctcatatggcccatagtttggattttttccctcaagttttatgggaattcattgagatgacataatctgacctatgttttaaagatgatgtgactgcagaccagaaaatggattagagagggcaacggggaagcagtaagactgttaagacttggatgcaatttctagaatgaccctagaatgctttaatgactcagctcagctgtttagttacttccttttccatttgctcccatccctaaactcccgttagtccagagtcattctgagactttcttaaggcttcatccatttacatttggaagcctctgcccatattatctatgtatttgttcattcatccattcattcaacagacacttacttagtatttttctctgtgccaggtactgttcactgttctaagcacttgacatttacttctcacagtcttctagaggtaggtattattattacccttttttttttttttttctgagacagagtcttgctctgtcacccaggctggagtgcagtggcacaatatcagctcattgcaaccaccacctcccaggttcaagtgattctcctgcctcagcctcccaagtagtggggactacaggcgtgtgccaccattccaggctaatttttgtatttttagtagagacggggtttcactatgttggccaggctggtctcaaactcctgacctcaggtgatccgcctgtcttggcctcaccctcctggaacccctaagtatctaaagtcctgaactcagtggcctgagggatgggctggcctcacagtgctcccagtctctatcctccacctctgatcctttcctgtctgtatctgggatcctggcccctactggttcaggccctactgactgaaaccctgctccaaatccctgcctagaattgagctcctgctgctttgctttcctcttgccagtcctgccatagggcactggagttttgccctgcagatcaggggattgagttccagatcccctggcctcacctgccctctgtgtagtgtctgcggctggattccctctcatttagcctacctggattgcaagtcacaggagctgaccatttccgaacaaaaccctgagagccaaatccgttgtgtttcttggacattgtgccagtccagtcagtacctctatttggcagctctatcgtgccagcctccattccaccctggaactcagggcgggtgatggatccactttgttggtttttctgccttttctcccactatctctgatggaccttctgggtactgagtagcacttcctttacatctgcttatgtgattatttggattatttatgtcttccttgttactcataagttctgcaaaggtgaggctcaacactgattttgcacagcattgtatcccagaatctaacagtgccaggcacttagatggtgctccgcatatttttattggatagattaatgacactgaggtgcattttgtatttacccttcctgttctgttccctttttttctcttccctttttcattttttcctagttcctctactctcttggcttcttcaaattcttaatctttttatctgataagagatggttctcctttccctgttcatgtattttgaatcaaagggctgctatttcccatttccatcttcattttcaaatgtgtggtcatacaatgctgttccaaatatatatatctggaagaccaggttaaaggctcagatagatttggtgtcttgtagggaccctgtctctgttttccaagatgttgcttggaaacagcagccttgttgctacatcctccagagggaatgaacactatgttctcatgtggtggaagtgatggtagacaaaagagactagggtgctctcttcaacctttttatttttgatggagtctccctcagttgctcaggctgaaatctgaaggcgtgatcttggctcactgcaacctctgcctcctgggttcaagagattctcctgccacagcctcccaagtagctgggattacaggcgcctgccaccacaccaggctaatttttgtatttttagtagagacagggtttcaccatgttggccaagctggtctcgaactcctgacctcaagtgatctgcctgcctccacctcccaaaatgctgggattacaggcatgagccaccgtgcccagcacccccttattttttttttataagaacaataatcccattcgtaaggatggatatggccaggtgcagtggtgcatatctatagtcccggctactcagaaggctgaggcagaaggatcgttcgagcccagtagttggagacccagcctaggcaacaaagcaagaacctgtctcaaaaccacaacaacacaaaaaacaagcggcagcttcagcaaatggaattataaggtggatgtatagtactctcaaacaccataacactgaaaaaaaaaatcagaggaaaaagagaactaaactctgcacaggaaaaaaggcagtgggtagtatttttcaaatgtcttgacattctaagaagtctctcaacagttaataaatacgattttctttggaaactgcctgtgaaatattttaatatttaagatttgttttggttattaagcttatgtaacatgccaaggcagaaattaagttacaaaaattcttgtcacagttggatatgacaacaacccattagtctagaccttaaaatgaaactagttcatacagtaatttttttttttttttttttgagacaggagcttgctctgtcatccagcctggagtgcagcatgcaacgccagcttactgaaacctctgcctcctgggcttaagccatcctctcacctcagcctcctgagtagctgggactacaagcgcatgccaccacacccagctaattttctttttttttttgatgttttgttgagacagggtctcactatattgcccgggctgttctctaactcctgggctcaaatgatcctcctgcctcagcctctcaaagtgttgcaattacacgcgtgagccaccacaacccacccataataaatatttgtaatttctacaatgcttgtcatctgcagcccttcaatgaccagcaaacacaaatagccttattttcctgtggttgaatacatttcataacacctggtagccaagcttactctgagccccatgagacaggaagggaagtatatgcttagatcaagacactttgtatcttgcaagaaaagaaatgggtgctaaaaggtaagtggcctgacaacatttcctagagaaatgcgtgaggtatggggaactctgagtagagcccagatttttcttctgggaatcatcagctctgaggaattaagggaaaggtgaaatcatggtttgtcctgtgttgaaaagtttagtaatctttcaactcacatatcatactggactattccctactttttttttattgttttatttcttatttatttatttatttatttttgagacagagtttcgctcttgttgcccaggctggagtgcaatggcatgatcttggctcaccacaacttccgcctcccaggttcaagcaattcacctgcctcagcctaccgagtaactgggattacaggcatgtgccaccatgcctggctaatgttttgtatttttagtagagacagggtttctccatgttggtcaggctggttttgaactcctgacctcaggtgatccacccacctcagcctcccgaagtgctgaaattacaggagtgagccaccacacctgacctttcttttcttttttgtttctttattttctttcctttttttttttttttttttgaaagagtctccttttgtcacccaggcaggagtatagtggtgtgatctttgcccattttaacctccaccacctgggttcaagagattctcctgccttagcctcctgggtagctggagctacaagcatgcaccaccacgcgggctaattttttatatttttagtggagacagggtttcaccatgttggccagactgatctcgaactcctgacctcaggtgatctgcccctctcagcctcccaaagtgctgggattacaggtgcgagccatggcgcccagccagttccctactcttttataccattaggatataaaccaacagactggttgatttgcacatttagaacagcttttctggtacttagtgtctgtcaaaatatggagaaaacaatgtaacagaatcagtggtcagctgagttcacttgagtcctggccctgccaacaagttagctatgtgcccttgggcgtatctcactgtcagacctcagaagaggaaggaagggagggagagagagtgagtgattgagagagagagagagagaggaaaggaaggaaggaaggaaggaaggagggagggagggaagggtgggcgaaaaaagagaagaagagagggaaagaaagggagagtgatgaagggagaaagggagtaaaggaaggagggaaggaggaagaaaagaaagggagggatggaaaaaagatggaacaaaatgattatgaagctctgtttcagttgtaatagtcaaaaccatgattcttttttatttccttttcctttttcttctttacaacacaagagcaacttcacaagaaaaaatgcaaagtcacaattgatagatacacatggctttctcccatctggttttggcaggacatccaatgattcctttgttctaaaaaaatatttaaaatcatagatgataaaaacaaatggaaaaacattccatgctcatggattgcaagaattaatatcattcgaatggccatactgcccaaagcaatctacagattcaacactattcctatcaaactaccaatgtcattttttacagaattagaaaaaaactatcccagaattcttttttttcttttttctttttttttttttttgagacggagtctcgctcagtgcaatggtgtgatctcagctcactgcaacctctgcctcccagactcaagcaatttttctgcttcagcctcccaagtagctaggattataggcacccaccaacatgcccagcaaatttttgtatttttagtagagacggggtttcaccctgttggccaggctggtcttgaactcctgacctcaggtgatccacccacctcggcgtctgaggctgaggcacacttacaggtgtgagccactgtgcccggccctcaaattcatatggaaccaaaaaaaaacaaaagaaaaaaaaagcttgaatagctacagcaatcctaagcaaaaagaacaaagccagagacatcacattatacaacttcaaattatactataaggttagaaagaaccaacacagcatgacactggtataaaaacagacacacagaccaatggaacagaatgaaaaccccagaaataaagctgcacacctacaaccatctgatcttcaataaagttgacaaaaacaacaatggggagaggattctctatttaataaaataaaaggtgctggaattactggctagccatatgcagaagaatgaaactggatccctccctttcatcatatacaaaaattaactcaagatggattaaaaatttaagtgtaatacctcaaacaataaaaatcccggaagaaaacctaggaaataccattctggacattggccttagcaaagaacttttgattaagtcctcaaaagcaattgcaataaaaaaaaattgacaagtggaacctaactaaactaaaaaggttttgcacagcaaagaaactctcaacagactaaacagataacccacagaatgggagaaaatttttgcaaactatgcatttgacaaaagtctaatgtctagaatctgtgaggaacttaacaagcaaaaaacaaccttattaaaaaatgagcaaagaacatgaacagacacttctcagaagaagacatacaagtggccaacaaacatatgaaaaaatgctcaaaactactaatcttcagagaaatgcaaatcaaaaccacaatgagataccaccttataccagtagagtggttactattaaaaagacaaaaaataacagatgctggctggttgcagcagctcacgcctgtaatcctagcactttgggaggctgaggcaggcagatcatctgaagtggggagttcaagaccagcctgaccaacatggagaaatcccgcaaacactaaaaatacaaaaatagccgggcgtggtggtacatgcctgtaatcccagctactagggaggctgaagcaggagaatcgcttgaaccaggaaggcagaggttgtggtgagccgagatcatgccattgcactccagcctgggcaacaagagcgaaacttggtctcaaaaaacataaaataacagatgctggagaggctgcggagaaaagggaatgcttatatactgaaggtgggaatgtaaattggttcagcctctatggaaagcagtttggagatttctcaaagaactaaaaatagaactaccattccatccagcaatctcattactgggtatatatccaaaagagaataaattgttctaccaaaaagacacaggcacttgtatgttcattacagcactattcacaacagcaaatatatggaatcaacctagatacccatcagcagtgaactggataaagaaaacgtgatacatatacagcatggaatacaatacagccataaaaaagaatgaaatcatgtcctttgtagcaatatggatgcagttggaggccatgatcctaaggaagttaacacaggagcagaaaaccaaatactgcatgttttcactttaaatggaagctaaacattgggtagatatggacataaagatgggaacagtagacactgacaactgctagaaggacagatggagagaggcaaggcctggaaaatgacctatagagcactatgcttactacctgggtgatgggactatctgtaccccaaacctcagtgtcatgcaatatgtcaagtaagaaacctacacatgtatctcctgaacataaaataaaagttgaaaaaatgctttgtgttgtgtttcctcacaagaaagaagcagctaaccagtctggatcatcagagagtgcctctcctacccagtggaaggagatccttttgcttggctggggcagaattattagctggcaggtacagaaactgcaggggcatctggacattgcattttcttatctcatttttgcactttgcccgtattaaccaactacctagatcttcactgcataccacatggactgtgaatggctgctttcacttgctttgctgttaagtcatattaatatacgtgtatcaaatttctagaaaataatgtctttgcagtgtagggaatatgatgaaaccaatggcactgtccctaccctagtgagatttgaatgggcatagagaaatgtgctctttctcttcaaggcatgcaacttggcctcccctttccttctctttgtttggattcttgtagttgcaaaggctagaaaaactctattaataaaatttcccatagcaaaatggggatctctactggcttttaacacagaccagtttgcacacagccggatttcgggattcaattatgttactgagtcaggtccatctcttggctagaatttccctcatgtacactttactctctggaaggtcatcgtcagaaaggtgaagcccagcagaacagctggcctaatcttcacaactttcatccagcaacaaaaaaaataatacctcttttctggtcccttcagcaatagttgtgggattggttcagagtgggtctgattgggtgggtgccattcctgaatcagtcactgtggctaagggaagggatgctccgattggtctggtcttagttaacagtcaacaaaaggagctgagaatgtggttgaccccacttactcagctacagggactgacaatgggcaggggacaaaatttcccaagagaaaggaaggacacctttacttaactccaagaagagtgaatgaatactggccgggctatgtgaaccaatatccacattatcctataacatgaatcttctgaatctcttcattcagaagaataagggagactaagcaggcagagggacgatgagatcaaccaggttgaagttggatacttgaccaaccccagtatcattttatcctaaggactaactgaaccaagtactaagtagactgtccacttttctgtttatctttgtcatatcacaagttagaattcttacaaatccttagtaaagctgctccttataatgtacacagggttttgctacattattgtttaaatgttgaaaagggtttcttttttcatccctcattgcattttggtttttcatagtgtgcaattttgctgcatttataatcattatgtactttgttttgggagaatgcattttgtcataaaagctcttcacacagcaagaggaatgatcagcttcacgatcaatatcccaggacaacctgttttttttcctccctaaaaatattaaaaataaattgtaaaactatatgtatagaaattgaataaagaaactgaaaccattttgattcttttaatcaagaaataattaatgtgtgcatgacaatattagaatattatttttaaaaggctgtatgtatttctttcccttttcctttcacaaagttgtcatttaaatctagctttgtttgtgatataataatgcagcacttgtgcacaaagtgtgacaaaactaacagaaagacttcttatgaataggaaaaatgaatgttttttaacttaaaggaaactgtatttaaaattcaatttttgaaaaatataataaagtcaaatataaatattatgaacagatgtttcttaagaagcttctgaaatgaatagtcaccatctggaaccatttacaaggagaagaaggtaagcacgcacctgtttctttctttaaaaagatgtaatctctgtcccaaattataaagaagtatggcagttaccataaaaatgtaatactcaatttgtcaaactgtttagaaaaatattgataagaatgtagatggtttagaaaagtgtgcttctaaaaggcttaatctgtcttcagatttgtttataattttttaaagataaaactctttaaagtggatgcatgttctaagtttcaaaaaacatgcgcaaaacctcaatagacactatcactgctgctgccaccactatcatccaaggtatctatttgctcattattgcatgttagatactccacaacaaaagttgaacccatatactccttccagttaatatgattgattgcattagtggctctaattaatgcccttcctttatccatggcctttgcaacatggtattgcagcagctttcatcaaaaaatggagtttttggccgggcatggtggctcacgcctgtaatcctagcactttgggaggccgaggccggtggatctcctgaggtcaggagttcgagaccagcctgggcaacatggtgaaaccccatctctactaaaaatacaaaaattagctaggcatggtggcgggcgcctataatcccagctgcttgggaggctgaggggcaggagaatcacttgaacctggggggtgtagattgcagtgagctgagatagcaccacttcactccagcctgagagaaagagtgaaactctgaaatggagtcttgttgcccatcctttgcatctgggctgaacttgtaacttgctttggccaacagaatacaggagaagaaacagcatgccagttccaagactagatctcaagaggttttgtactttctcattctccctcgtggagccttgctactgccatgtaaataaacttggattattctgctggaggaggagagatgacatgggggagagccttgcaaaggccatcttagagcagtaagacagcaagccaagatcagcaaagcagccttacttagctgtttgcctgcagcaggaggcttttaatttctccctgtcttaggattgagagggtgatacaaaagttgctaaaagattttgggaacttctggctactgtccttgaactgtagggaggtaggcatagttgcagggacatagtgcaaaagagaagatgctgggatttacagatagatcttgatttgcagattggaggctctaaataaacaaaataggaaaaactcatggggtttgtatagaaatacaattaacttattgaggaggataatctattttaaattattttggcatatttttaatataattacaaatgaggctaatctctttatcaaaactcttccttcctataaatgaattcttcttgttcaatagttagctccacatgctgtatgttcttctaaaacactcaactactttatctgtaagttaattcatttcctagctaattcatcttaattagaatacttttaccataactgaattgagttgtattaactccattagtaaatttatctgaaagttcttgaaacaaaatttcaaagagtgaagcaatgaagagttacttttcaccgggtgtggtggctcacgcctataatcccagaactttgggaggccgaggtgggcagatcacgaggtcaggaattctacaccagccttgccaacatggcgaaaccccgtctctactaaaagtacaaaaaaattagcccagtgtgctggcaggtgcctgtaatcctagctacttgggaggctgaggcaggagaatcgcttgaacccggaaggtggaggttgcagtgagccaaaatcatgccattgcactccagcctgggtgacaagagccaagactctgtctcaaaaaaaaaaaaaaaagaataaaaagaaaagttatgtttcatattggtaatgatcatttattggttacttccctggcatctatcttccagttttccctttacctttactccacaatgtgaaaacctccacagtgtaaaaccctcattcctggtcatgtgatttgggtggaaccaactttactccaaatgacaggggtgggctctgattggcttatgtcccatggtcacttgtgttggttctggggtgatatgctgcacagtcagagacaacaagatgccaggagatgtttgttggccttctgttgtggaaaagctgggcaatttccctgcatggtatgagaactagaattgcgccgggcgcggtggctcacgcctgtaatcccagcactttgggaggccgaggcgggcggatcacaaggtcaggagatcgagaccgtcctggctaacgcagtgaaaccccatctctactaaaaatacaaaaattagccgggcctggcggcgtgtgcctgtaatctcagctgctggggaggctgaggcaggagaatggcgtgaacccgggaggcggagcttgcagtgagccgagattgcgccacggcactccagcctgggcgaaagagtgagactccgtcaccaaaaaaaaaaaaaaaaaatgataactagaattatggaagtttccttccttccttccttccttccttccttccttccttccttccttccttccttccttccttccttccttccctccctgcttgcttgctttctttctttctttctttctttctttctttctttttttgactgagtcttgctgtatcgcccaggctggagtgcagtggggacgatttcggctcactgcaacctctgcctcctggattcaagcgatcctcctgcctcagcctcctgagtagctgggattacaggcatgcaccaccaggcccagctaatttctgtattttttagtagagatgggatttcaccatgttggccaggctggtcttgaactcctgacctcaggtgatctgcccacctcggcctcccaaagtgctgggattacacgtgtgaaccaccaggcccagccagaagtcatttttctataagcagaggaaaggagatcctagagttgccagagagccacaaagtggagtctaacggtaaagccagaccatagaaggcagaaaagagacatatagaaaaaaaatgggtccttggaaacattattcgagctgctagatacagccttgcctgaagttaacattgcctctggagtttttgctgatgagaccgataaatttctattattatttaaaccaaattgagttgttttcctcacttgcaagtgaaagatcactgaaacaatctgtacctcttagtttccaggtttgcctcaagcaccctagttcaggccctctttcctcttgcctggactactgcactctcttaactacaggccctatttcaagactttaccttcagatctctacttccctactgggttaatatctattttttttttttttttttttttttgagacagagtctcgctctgtcaccaaggctggagtgcagtgacgcaatctctgctccttgcaacctccgcctcccgggttcaagcaattcccctgcctcagcctcctgagtagctgggattacaggcatgcaccaccacgcccagctaattccagctaatttttgtatttttagtagagagaaggtttcaccatattggccaggctggtcttgaactcctgacctcgtgatccacccgcctcggcctcccaaagtgctgggattacaggcgtaagccactgcgccagcccatgggttaatatctcttaagcacatctacagtcatatctccttgctcaaagaccttcagtgggtctccagtgctgactggactgtactaaaaacaaacatcttattttgacattccaggcccacctccgtgtttcccagccattcttaaggcttcccatgatctccattcaatgttggtaagtcagaaaatatcttttcactttttcttattcttttttttttttgagatggagtttaattcttgttgcctaggctggagttcaatggcgcgatctcggctcactgcaacctccacctcccaggttcaggcgattctcctgcctcagccttcctgagtagctgggattacaggcatgtgccaccaggcatggctaattttgtacttttagtagagacggggtttctccatgttggtcaggctggtcttgaactcccgacctcagatgatctgcctgcctcggcctcccacgcctgggattacaggcatgagccaccgcaccggccaactttttcttatttgacagctcattagtgtttagcattgttgatggctctctactaagacgttcttttccctagtgtctgtaatacagcattcagattgttcttctctactcaaatattaaatgttggactttttcacgtttgtattctagtattgctttcttctgagttgacatacatcacattttctggacatctctcatctattcctatgacttaaaattccccctttttgtctttactttctttttcttttctttttttttttttttttttttgagacgaagtttcgctctttgctcttttcatccaggctggagtgcagtggcgcgatctcagatcactgcaatctccgcctccccagttcaagcaattctcctgcctcagcctcctgagtagctaggattacaggtgcatgccaccaccagctaattttttgtatttttagtagagacagggtttcaccatgttggccaggctggtctcaaacttctgacctcaagtgatctgcccaccttggcctcccaaaatgctgacattacaggcgtgagccatcgcacttgcttttttttttttttttttttttttttgagacggagttttgctcttgttacccaggctggagtgcagtggcacgatctcagatcgctgcaacctctgccccccaggttcaagagattctcctgcctcaacttcctgagtagctgggattacaggtgcctgccactacacccagctaattttttgtatttttagtagagaaggggtttcatcatgttggccagactggcctcgaactccagacctcaggtgatccacccgcctcggcttcccgaagtgctgggattacaggcatgagccaccgtgcccagactttttttttaaaaaaaaaaaaaaaaaaaaaaaagatgaggcctcactatgttgctcaggctggtctcaaactcctaggctcaagtgatcctcttgccccttggcttctagagtcactgggacggcaaggtgcaccaccacatctggctaaaataccttttaaatgccaatgactcctaaatccaaggctccagctgagacttctcctctaagtttcaagtcccaacatccattttttccattggacatcctcatctcagcctttccacgttcccctttcctactcccatagttgtcaccacttatctaggtgctcatgccagaaatttcgaaattatgctggtctcttgcacctttttaattcttcaaatctaatcaaacactaaatcctctcaattctacatgctaaacatctcttgtctttgttacttctctctgttccctggccgtcaccctctaggaaaagccaaaaatcacctgtcctgaactattcaatagtctcctaactggtttcccaactcccacaacctttcaacatttactggggggcttaattaaaaatactaaacacaaattgggctggacgcagtggctcatgcctgtatttacttttttttaatttaaatttaatttcttttatttttttaaacagaaattcactctgtcacccaggcttgagtgcagtggtgtgatcttggctcactgcagcttctctgcctcccaggttcaagcgattctcctgcctcagcttcctgagtagctgggattacaggcacacaccaccacccctggctaatttttgtatttttagcagagatggggtttcgccatgtttgacaagctggtctcaaactcctggcttcaatcgatctgcctgccttggcctcccaaagtgctgagattataggcatgagccaccataaaatactttttaaaattttaaaaatacagaaggagtctcactatgctgcccagactggtctcaatctcctggactcaagcaatcctcccatcttggcctcccaaagtgctgggattatagttgtgagccattgtgctggcctcatgtatataatcccagcactttgggagactgaagtgggaggattgcttgaggccaggagttcaagactagcctgggcaacatagccagaccttgtttctacaaaaacaagaaaactatccaggtgtggtggcgcatgcgtatcatcctagctactcaggaggctgaggtgggaagatcgctggagcctaggaatttgaggctgcagtaagctatgattgccgccactgcactccaggctgagcaacagagtgagaccctgtctcttgaaaataaataaataaacacaaattctgtctttcctttttaaaatgtcatgcttacatgtgcgtgaagattgaaaataaattaaaaaggaagctaaatgttttgcataaaataaatttctcaaagtatattattagcttgtgaaataaagaagcggatacagatgccccttttaaaataatattttaaaaccattatttaaataagtctcttacaaaggagtatatttgagaaagcaaagaagtaaaaactctcaaacctcttagcatgtttctatcttcgtatctatttgccacagtggagagaattgctgacaaaaaaaaagttaagtactataggtcatgcaaataggcagttgctaatgacaatgttacaagttaaaaatttgaattataaacgttgaattaattttcattgcatgtggtttcttttgataagatccttttaaatgtagtctaaattttaatttattgcacttaaaaataaaatcaatgccatttattaaaagaaaatgtgggctgattgttaattcagcctttgtgtttggggtaaatgagtcagaacctcctagcatctaagcttttcttaggtggtaaagggaaattcttgggaacctttattaacttttcctagccacatgaacatgttcaaaaagctacagttcgaaagctgtgctaacaaagaagaatgcagggcccaaactcaaactgattgcactgttcagttcactcagtaaacagtcatttcctacattagccagttatcagagctttaggagatatgccaaatacacataattagtttttgaaaacttagtacataataactgcatttaaggccaaaaatatactaaacataattttaggtatttgtgaacttaataattgatactgttcatagcattatgctacatgccctgcatgcactatctcatttaatcctcccaacaattcaatgtgatatgtactattattctctattccctttacacaatggaggcaattgaggctcagagtggttaagtaacttgaccatagccacacggctagggggagctagaattacgggccatggagctgggtgtggtcgtgggtgcctatactcccagatgggaggatcccttgagcccagcagcataagggcagcctgggcaacaaaaataagaccctgtctctgaaaaacaaaacaaaacaagccatgttttccgactctgaagccagtagatttagtcacaattgtgtactacttctttttagattacaaatttgaatattcctgtcctgtaaggtgtggaaatgataataccaatttctgattatacaataatgaaaagctgaatttgacgccatatttaatttttcaaatttctcacaggaaatatatgtttctcccagagagagttttagcaatcaaaaaacagttcttccaggaaatgggtggacttctcttatctcaggacacttggtggcttatcagtatcaacttgatttcccaatacttgttttagagtaatttaaattctattaatgctgataagccctgcccatctccgtatcagttacaggataggacatctgggaggcaggctctgtttgatggggacagcccagtggggatttgcctgggggaagaggaaataagtgcaccttaagcagagaattgagaaaactagagtctagctcactgcaacagtttgtttgtttcttgagacagggtctcactctgttacccaggctggagtgtggtggtgcagtcatggttcactgtagccttggcctccctggctcaagcaatcctctcacctcagcctcccaagtagctgggactacaggcacacaacaccatacccaactaatttttgtatttttggggtttctccatgttgtccaggctggtctcgaactcctgagctcaagaagtcctcctgcctcagcttctcaaaatgctcaacagttattaaataaaggtggagcatccctgacctgaaaatccaaaatctgcaatgcttcagaatttgaaaacttttgagcaccgacatgatgccacagtggaaattccacacctgacctcatgagataggtagcagagattatttaaaatattgtataaaattaccttcaggctacgtgtagaaagtgcatatgaaacataaatgaactttgtgtttagatgtgggtcccctccccaaggtatctcattatgtatattccaaaatctgaaaaaattccaaattcaaaacacttcgggccgggcggggtggctcacccctgtaatcccagcactttgggaggccgaggcaggcagatcacctgagatcgggagttaaagaccagcctggccaacatggtgaaaccccatctctactaaaaatacaaaaattagccaggtgtggtagcacacatctgtaatcccaggtactcgggaggctgaggtaggagaatcgcttgaacctgggaggtggaggttgccgtgaactaagattgtgccactgcattccagcctgggtgacagagtaagacttcatctcaaaaacaaaaacaaaaacaacaacaaaaaacccactccagtaccaagcattttggataagggaataagggacactctacctgttcctgtcatgtgttaggcactgtgctccccacttttatctggtaatattggcttttacagttgaggaaactgaggcccagaaaggtgtgacagccacagtcacagtagtgcagaaccctaatgtgtccgacttttatccaacactctgctccgcagcgctgtcgggtgaaggcatgcacagaggctggaatccagcactcactgcctgttcagagtcccaggacagggcaactctgagccagcacagtgagggctgtgagaaacatgggacactgccgcctgcctttcagaacaatgcagtttcgcttcctctgggatcaagtccaacgacgattgtacttcccaatctcctctcccagtttattaacagacgcaagttttctttatcaaaaaaaataaaaaacctttccttgaccttgctacacttggaagcaacccccttatctttcagctcttccttgctcaacctctcttaaaaggggtttacaccaaggccaggcgccatggttcgcgcctgtaatcccagtattttgggaggccaagatgggcagattacttgaggtcaggtcgagaccagcctgaccaatgtggtgaaacgccatctctactaaaaatacaaatatgagctaggcatggtggcacacgcttgtaatcccagctactaaggaggctgaggcaggagaatcacttgaatttgggtggtggaggttgcactgcactccagcctgggtcacagagcagactctgtctcagaaaaaaggagaggccgggggtagggtggttacactagctgccatgggtagggtggccctgggttacccaggacataggagtttcctgaaatgtgtgactttctgtgctaaaaaggggacagtcctagacgcattaggacagttggtgaccataataccaagaggatcctctccttactctgggcttatgttcagatttaaccttaggaatctgcctttctcctccatccactgaaaccaacactaacacctaaactcagtgggttttgttgtgttttcttagttctggagcatttgactggtgaacttttccttcttgaaattccttggtttctttcttcaccctcagtagccccacaaagttataattttatttcttctaggtggctcatgcctgaaatcccaacactttgggagattgaggcaggtggatcacttgaggtcagaagttcgagaccagcctggccaatatggcaaaactgtgtctctactaaaaatacaaaaattggccagctatggtggggtgcttctgtaatggtatggtgtacggtatggccgggtatggtggggtacttctgtaatggtagggtgtacagtatggctgggtatggtggggtacttctgtaatggtagggtgtacagtatggctgggtatggtggggtgcttctgtaatggtatggtgtacggtatggccgggtatggtggggtgtttctgtgctactcaggaggctgagacacgataattacttgaacttgggaggtggaggttgcagtaagccgatatcacaccactgcactccaacctggatgacagagtgagactctatctcaaaataaataaataaatacaataaataaataaatatataagctgggttcggtggctcacgcctgtaatctcagctctttgggaggctgaggtgggtggatcgcgaggtcaggagctcgagggcagcctggccaatatggtgaaaccctgtctcttttaaaaatacaaaaaaaattagccaggcatggtggcacacgcctgtagtcccagctactatggaggctgagacaggagaatcacttgaacccaggagacagaggttgcagtgagccaagattgcgccactgcactcccgcctgggcaacagaacaagactccatctcaaaaaaataaaaataaaaataaataaaattaaaataaatacataattttctttctcctaacaaattcttctctgtctgtttcattgactcctttgactaccaaattctgacatcaaactgcatgggatcaggtggatctgggttcaagatctagttctttacttgtgagttctgttaacatgacaagttatttgattcccctgaaccttagctttctggtctgcagtactgagttaacaacacttacttacactgtaccataacgactgggagagaaatatttcaaatatttaaggcagctgttggaagaaagcaagccttattaaaaggaagttatagttatgactgtggttcatcatatcttagggcttcaactttcatttccatgcagcttgacagactgcagcctcaagtactctttctacttctatgacctaatttctaattgctgcctttcccaggttgtcttctagctctatcagtgaaaaatactagaggatgaggtggctcacgtctctcatcccagcactttgggaggccaaggtggaaggatcccttgagctcaggagtttgagattagcctgggcaacataatgagacctcatctctacaaaaaattaaaaaattagccaggcatggtggcacacacctgttattccagctactcgggtggatagcaggatcgcatgagcccaggaagttgaggctgcagtgagctgtgatcatgccactgcactccagtgtgggtgacagagtgagttcctgtctcaaaaacaaatttaaaaaattaaaattaaaaatatttaaggccaggcacagtggttcacacctgtgatccttgcattttgggaggccgaggggggtggatcacctgaggtcaggagttccagactagcctggccaacatggtgaaaccccgtctctactaaaaatgcaaaaaattagccgggtgtggtggtatgcacctgtaatcccagctacttgggaggctgaggcaggagaatcgcttgaacccaggaggcggaggttgcagtgagccaagatggcaccactgagcttctagcctgggcaacagagcaaaactctgtctgaaaaacaaacaaaaaaacaatttaaggccaggcgcggtggctcatgcctataatcccagcactttgggaggccgaagcgggtggatcacgaggtcaggagttcgagatcagcctggtcaacatggtgaaaccccatctctactaaaaatacaaaaaattagccaggcgtggtggtgcatgcctgtaatcccagctactcaggaggctgaggcaggagaatcacttgaacccagggggtggaggttgcagtgagcccagatcatgccattgaactccagccccggagacagagcaaaactccatctcgagaaaaaaaaacaacaaaaaaaaagcaatttaagaccaaagctatcatcttctcctcaaactaaatctaagaaacagtgtctcctcctaggtaacaggattctcaggaatccaggttgaaacactcctggctagctttgacttattctctgattcttctgtctccccatccacatctaatcagttccaaatctgactcattttctatggtatggttgttgattttccttcctcttgtattgattcccagtgccactgctcttcccgcttctgcccaccccctaaccccccggctcccatctcagtgtctcataagcttgtacccgggctattccagtagtctttttactgactcctcaacccacaagatcttttgtgcctgcttttgccggattaatttcctaacgcaagactcaaaaagaccttcagaaacaaataaggcacaaactcattggtccgactttcaaggctaaaggttcaagactttcgaaaatgacttagcccacatcatttgattgcttaataagtgcttcttgagtattcagattcaagcaattccttgagaaatactatgattatttcctcaattcaaatcaggattggctgggcatgcctgtaatcccaatactttcggaagccaagacagggaggactgcttgaggccaggagttcaagaccagccttggcaacatagtgagacccccatatccataaacaataaaaattagtcaggtgtggtggtgcacctgtagaccctgttactctggaggctgaggcaggaggatagcttgagcccaacattttgaggctacagtgagccatgattgcaccactgtactccagccttagtgacagactatctccaaaacatttaaaaaatcaggattttgtccccaccttccaataacattcctgtttgcaagttcacctataagcttacattcccaaatccaatgctactctttttttttttttagacggagcctcactctgtcacccaggctggagtgcagtggtgcgatctcagctcactgcaacctccgcctcccaggttcaagtgattctgctgcctcagcctcctgagtagcagggattacaggttcgagccaccatgcctggctaatttttgtatttttagtacagatggggtttcaacatgttggccagactggtcaggtgatctgcatgccttggcctctcaaagtgctgagattacaggtgtgagccactgtggctggccccagtgctactcttctttgcattcatgctatcccacctcttgactgtagggcctcaccctcctttacacatttcctctcctctgccacaaggaatggatcaagaatggttccaaagtatttgatctgagcaaccagaagaatgcaggtctgaatatggaaaggaatgggaatgagctggaaatatgaaaatgggatgcttgattgaggctatagaaaaaggcttaagaaaatattaagaaagacaaaatccagagaggcccatgggagtgtatggttaagatagggtagagacaaaattattaaaggtgaggagattaagaaaatgagctgtgtgtggtaatacatccctgtggtcccagcaactccaggggctgaggcaggaggatcccttgagcccaggagttcaaacccaggggtttgaggccagcctggacaacatagccaagcttccacctctaaaaaaaaaaaaaaaaaaaagaaagaaagaaaagaaaagaaaagaaaaaacgaggctgagggctgggtccagtggctcacacctgtaatcccagcactttgggaggctgaggcaggcagatcagttgaggtcaggagtttgagaccagcctggccaacatggtgaaactccatctctaccaaaaaatacaaaaattagttgggcatggtggcatgcgcctgtggtcccagctactcgggaggctgaggtaggaggatcacttgagccccagaggtggaggttgcagtgagctgaaattgccctgctgcacaccagcctgggtgacagagcaagactccatctcaaataaataaataggctgggtgcatggctcatgcctgtaatcccagcactttgggaggctgagctggtagatcacctgaggtcaggggttcgagaccagctttgctaacatggagaaacccgtgtctactaaaaatacaaaaattaaccaggcatggtagcgggcacctgtagtcacagctactcagaaggctgaggcaggagaatctcttggacccgggaggcagaggttgcagttagccaaaattgcaccactgcactccagcctgggtaacagagcgagactccatcatcagaaaaaaaaaaaaaaaagaagaaattaatattgacattgctagtatctcatattcataccccattcaagttttgccacttagatcaaaaggattcaatgccaaatcaagcattatgtttagtttatcatgttcctttaacctactccattatagaaagtttccttggttagtgcctctgcccggccgccaaccgtctgggaagtgaggagcgcctccgcctggccactgccccgtctgggaagtgaggagcgcctctgtctggctgccaactgactgggatgtgaggagcgcctctacccggctgccaaccgtctaggaagcgaggagcaggcgcctctgcctggctgccaaccgtctgggaagtaaggagcgcctctgcccagccaccccatctgggaagtgaggagcgcctctgtccggccattgtgcaaccttccaagtgtgaagtgacagccttgtgtgtgatcttttctgtcttccccaagtttgcattttcgacattaaagtttactttttaattaaaagttttaaattggagaatatatacataaaaaagaaagattccttggtcttctattgacttttatgaccctgataattttgaagcttgtagttagcttattttgtaaaatgcccttcaatttgggtttttctgatatttccttgtgattagattcatgtagcaggatgatcacagaagtgatgtcgtgtacttctcattgtatggtaccaatggtgcacagtttcaatttgtcccattactgatgtcaaaagacaaaatcatgagtttagttatagacctaattggcttttatttggaatttatgagttaagatagcctctattctacaaaatagaagaatagattggcagggggcaaaagagaagtgggttttgtaaggtgagaacaaggaaacagaacaatagaaataaagctgattgaccaatgtcaagttacttcaggttacttttttcccttttctttctttcttttttttttttttttttgagacaaagtctcactctgtagcccagctggagtgcagtggcatgatcttggctcactgcaacctcctcctcctgggttccagcgattctcatgcctcagcctccacagtagctgggactacaggtgtgtgccaccacacccggctaatttttgtatttttagtagaggtggggtttcgccatgttggccaggctggtctcaaactcctggtctcaaacgatccacccacctcggcttcccaaagtgctgaaattacagacatgagctaccacacccagtccagattacctttttgtaagggttaaagcagaggggacttccttatcatgctgtataaaactggcctgtttagggatttggctatttttctttcctgatttcttggaaggtcagataaacaacttagttttggcttggtttaactccattttggtctgttaggcctagggtaggagcccagtctgaaccaatgccctcctattaagttttatttaattaacactgatgatgttcattttgtataatttttttaacacactctaagaaaccagaataatgttgttgttttagagataggatcttggtctgtcactcaggctggagtctagtgacatgatcgcagttcactgcaggctcaaactcttgggctcaagcaatgatgatgttcagctggatcacatgattactgtggtgtctgcccgctttttcactgtaaagagactctcttttcctttataatgaataactatgtaaatgtcccatcccttcaaactcttaatttactcatgttttaatgtacatctgaatgggctcatgatttctattttagcaaatagattataatttgttactataattatttaatttaatgttcaaatcctgaccacaccggccaggggaagcccattcaagttcacttctgtgtcctttgacagatcctcatcattgttggagtactgtcttgatttctggtacaagatgttccaggctcatcgtgtgcattctcagtcttaactctagaatctgccagctctccaagaagtcctcattccttttagtgaaaaacaatatttagaaaccagatctgagcactaggtgtgttcattgctcatggggtgtcgctgctctcggcacacggagctagggaatagaaatgtatatgcatatatacacatttaaaactatattattcgttgatctctatatatgataaactttaagttttcaccaacacatctaattctggttcaacaattcagaatttatcctagttttccttatttccatagagacctggctgtcattattcttatcgcatttatttatttgatcaatcctctggagtacggctaatatcccatctcattctcccatgtgacaggctttctctcctgtttgagtcctgacttcccatgccagaggctgccctgcttcatggacaacttgctcacctctcctgggtgctgacaccccacatcccttcacctggcatcccacttatgcatcctgcccaggctctgcttcctcatgctgggccactgtggattcctctgtctcccaaccttggaggtctaccatgctcaatttacctaaaaattagagggagggggagaagagagaagggaggtagaagtgtagggaagtgagaagtggaaggcagatgaaggagggaggggagggaatagaagagaagtggggtgggtagaaggagaatggaagagaggaggaagagggggaaaagaaagagaatgaagagggagggaagggtaaagagaagggtggaagagaggaaaggtgaggaaaaatgtgtaatttttaatctctttaaaaaaggcaatggctaggctgggcatggtggctcacgcctgtaatcccagcactttgggaagccaagacaggcggatcacttgaagtcaagagttcaagaccagcctggccaacatggtgaaacactgtctctactaaaaatacaaaaattagctgggcatggtgatgcatgcctgtagtcccagctactcgaaaggctgaggcaggagtattgcttgaactaggaaggcggaggttgcagtgagccaagattgggccactgcactccagcctgggggtgacagagctaaactccgtctcaaaaaaaaaaaagaaaaaaaggcaatgtccaggtgcgatggctcatgcctataatcccagcacgttgggaggccaaggtgggaggatcacatgagtttgagaccagcctggacaacatagtgagaccctgtctctacaaaaaaaaatttttaattagccaaacatggtggcatgagctttagtcccagctaattgggaggctgaggtgtgaggatcccttgagctcaggaggttgaggctgcaatgagccatgtgggcctctgtactctagcctgggtgataaagtgagagtctgtctcaatcaatcaaccaatcaataaaaattaaaaaagcaaaggcaaacatgataaaatgttaagttttgacaaaggctgggtaatggctaaatgagtgtttggtgggttttttttctttctttttttgtatcgtctgtggtttgcttttcatactatgtgtgatagggtttccttcttcttgaattatttccatgccattatggactgacattcttataaatatactaaaaatgaataaatagaaaagtgaaatagcaaaccaaagacatgtaaaatataggctccccaatttttattattagattcaagagacataagattattctgtgaaagcactatgaaattttctaaatgcattctctcaatttcttcgtttctccactgaccagtagtaagagccatgaggagcactgtctgttagcaacccacagtttgagtaacactgtagtctagattttttcttgctcgacatatgacttttaaaaataagatgaaaaacaggccaggtgcggtggctcacacctctagtcccagcactttgggaggccgaggtgggcagatcatgaggtcaggagttcaagaccagcctggccaagatggtgaaaccccatctctactaaaaatacaaaacttagccaggtgtagtggtgggtgcctgtaatcccacctactcgggaggctgaggcaggagaactgcttgaacccaggaggcagaagttgcagtgagccaagatggtgtcaccgcactccagcctaggcgacagagtgagactccgtctcaaaaaaaaaaaaaaaagaaaaaaaagataaaaaacaaagactaagagtctggcttctgcttcgaaaagtcacagctgtgttcatgaatttgtgggtgactaggtgaggccttctgcaggcattcattccactgccaaagcatcctgccaaaataatggtgtttagggactggtaagctgccctgaccttgacttcctggaatccagggatgaaagaaacaaaagagacagagagcagactgggagaaccaaagggacagaagcccaggcagacagaagcccattagaaggctccttacagaacacaaaaacttctaagcagagagaggagatgggcaggccattgtaaagagattactttcaaaaaattgcatctgtgggtctggatcttccccagacaaggcagtctcctttccagtcattcctggtccatgagcctgagtaacttggagtgttggcagctactctgaaaaccacgcctttggctccacgttttgcagacagtgactaccccctgagagccttgtctcctgtcatctgtgtggagattctgcagtccccattgttctgggatcctgtaaacaaaatcacagtggaagaggggagataaagaacagatgtgaccagcacatctgaaatacaaaacaaagcacgacagaaaacaagggcgctgcacagttttctccacagtggggatcaggtttctatggggtttgacttcgccttggcacagggcgctctgagtgggtagtgagcgtgctcagcacaggaagaaaggggctctctgtggtgttcattttgaaggtttatgtttttagagcagccattttgatttgaaaaatgtgtcagcttaatgccttctccccaggggcctgaaagaccatttctttaagtgtgaatttcccagcaaaatatttactagatttttgggctttttttttttttttaagtatagttaacctggaattttccctaatagttagaagtgtttttttctttaaatgaaccctttagcgcagtcgtgtagaaaatactattcttcatatttcctctgctagaaggctttatgttgcattttccttcccccaatggcatttttatccatgcctgacaagccactttgacaggtggccctgggaattctctagaggccaggatgaggtctggataccattcctgggtggtctgagagcagggtatttaaagctaacttttcacattctgggtctggaattgtttctgaatccattcctcagaggtctgctgcttgttctatgagacttttccttccagtatatgaactgggattttggctgcatgtgctcattaagaaaaccatgtcacttgtctcaagtgtaaaaaagagtgtttcaaatgttcctggaaaactttcagctggtctacctccatgcctaggtccttcttataatttcccgtattcctccctgcccgggttgtccatcagagttatttctgaggcagaatgactgccatggttcagccaggcagactggctgcctgtaggtgatgggtaaagtcattgatttggatgactgactgacactgtagagttccttagagaaggggctcaggggtgaggaaggtgttcctaggctggatttctattagtgtggccaagacagaagatttataacaacccttcaaggatttaatacccttttgtggatatgatcccagaggatcttattaatgcagaggctcattctaaagcgaagaaactcaatagacataaaagcaggggggaaaaaacctagcctttattcccaaagatttacttaggatggaatttttttttcttttttttttgagatgatgtcttgctttactacccaggctggagtgcagtggcacgatctcagctcactgtaacctccacctcccaggttcaggcagttctctgcctcagcctcccaagtagctgggattacaggtgcccaccaccacgcccggctaatttttatattttcagtagagatgaggtttcaccatcttggccaggctggtctcgaactcctcaccgcgggtgatccacccgccttggcctcccaaagtgctgggattacaggcataaaccaccgtgcctggctaggatggaattttttttaatgaagccccattcacgtgtaatttcttaaatgtttttgagcctatttacctaattattttatcttctattttttaattgacaaataaaaattgtatatatttatggcatacaacataatgttttgaaatttggagtggctaaatcaagctaattagcctatgtattaccttacgttatttattataatttttaattgaaaaaatgtttggtgtgatccttttggatttgttgtcagcatcagcatggctatgaacatacacaactaagcacttagagactgttctgagttcttcaggatatttttttctgttttttcctttcttttctttctttctttctttctttttttttttttcttttgagatggagtctcgctccgttgccgaggctagagtgcagtggtgcaatcttggctcactgcaacctccgcctcccaggtccaagtgattctcctgcttcagcctcccaggtagctgggactacagatacctgttgccatgcctggctaatttttgtatttttagtagagatggggtttcactatgttggccaggctggtcttgaactcctgacctcaagtgatccacctgcctcagcctcccaagtgtagggattacaggcgtgagccactctgttttttcctttctcatctattttgtgaaagaaggtagtcctaaagttatggcactgggcaacaccgacctcaggggattaaggactattaacctgcattcaaaacaatatcactcttctttaaaataaataaataaattgaaacagggtctcactctgttgcccagtttggagtgcagtggcatgatcatgactcactgcaacctagacctccagggctcaagcaattctgccacctcagcctcccgagtagttgggattacaggcgtgtgccaccatgcccggtaaatttttgttttttgtttttgtctttttatatttttttttggtagagacagggttttgccatgttgccaaacaggtcttaaacacctgggcccaagcaatccaccacctcagcttccaaaattgctgggattagaggtgtgtctggccacagtatgactcttaagggaatgaaaagacaagactgggagaaattctttgtaaaacatgtatctgataaagaatttaggccaggctcattggctgatgcctgtaatcccagcactttgggagaccgaggtgggtgggtcacgaagtcaggagttcaagaacagcctggccaagatggtgaaaccccatctctactaaaaatacaaaaattagctaggtgtggtggtgggtgtctgtaatcccagctacttgggaggctgaggaaggagaattgcttgaacctgggaggtggaggttgcagtgagccgagatcgtgccactccactccagtcttggcaacagagcaagactccatctcaaaacatatatatatatatatatatatatatatatatatatatatatatatatatatacacacacatatatatacacacacacacatatatatacatatatgtgtgtatatatatatatctgataaagaatttgtatccaaaatataccaagaacccttaaaactcagcaattaaagattttaattaaaaatggacaaaagagctgaacagacacctcacaaaaaaagatatgcagatggaacaaacatgaaatgatgcaatacattatatgccattaaggaattgcaaattaaaacaacaatgagatatcactgcacacctattagaatggtaaaaacatattttaaaaaacactgacaccaccaaatgctgggtgaggatgtggagcaccaggaactctcattcattcctggttgtaaatgcaaaatggtacaaccattttggaggacagtccggcagtttcttacaaagctaaacagtcttactacatgatctagcaattgtgctcctgggtttttacccaaatgaattaaaaacttatgtctactcaaaaagttgcacattgatattcatagcagctttattcataattgcccaaaactggaaacagtcaagatgtcctttgagaagtgaatgagtaaatggtagtacatccataaaatggaatgttatgtgatgataaaaaggaaatgagctatcaactcatgaaaagacatggaggaaactcaaatgcatatttctaaaagtagctagtctataaaggctacatatacatactttatgattccacatatacgacattctggaaaaggaaaagcttagaggcagtacaacgatcagtggttgccaggggttggggaggagggagggaggaatggatgtgggtgaagcatcactattctgtgtaatattacagtggtggatatatgatggtatgcatttgtcaaaacccatagaactgcacaacacaaagagtgaatcctaatataaactatggccttggccaggtgtagtggctcacacctataatcccagcattttgggaggctgaggcaggagaatcacttgcggtcaggagttcgagaccagcctggccaacatggtgaaactctgtctctactaaaaatacaaaaattaatcaggcatagtggcacacaacctgtaatcccagctactcgggaggctgaggcaggagaattgcttgagcccggaggcggaggttatagtgagctgagatcgcaccactgcactccagcctgggtgacagagcgagtctccattaaaaaaaaaaaaatcactatggcttttgttaataacaatatattaatatgggttcatcaattgtaacaaatgtactgcattaattcaagatgttaataatagggaaaactaggggaggtgggagtatatggaaactctttgtactatctgctcaatttttatgtaaacctaaaactgctctaaaaagtaaagtctaataatttttttttaaaagagactcaaaatgatcagtttcatgatgaagggaaactctgtcttctactatatctcatatctttgcttgttcctcaagggccctggtctagcttgttaaccatcgtattcccaatggcacatagatgctcaataaagactgctaaatcagtatgttcaaaaggcttagccattaaaacctgctcttggctgggagcagtggctcacgcctgtaatcctaacactttgggaggctgaggtgggtggatcgcttgaggtcaggcattggaggccagcctggccaacatggtgaaacactatctctacaaaaaaatacaaaaatcagccagctgtggtggcagccacctgtggtcccagctacttgggaggctgaggtgggaggatcacttgtgtccgagagttcgaggctgtagtaagctgtgataacaccgtgatcagcctgggtgacaaagtgagatcctatctcaaacaacaacaacaacacttttgttcttatcactttatactctgtttgacagacagaacttgaccaagcacaaaccactgaattattagttattatgtatggaacatttaatgtgtatcagccatttttctagaatcttgacatgtagtacttaataattcatttactcctcatgagaacctggtgaaatggtacttgttttacagatgaggaaacttggccataaagagtttaaataggccgggtgtggtggctcacacttgtaatcccagcactgtgggagtctgaggcaggttgatcacctgagtcaggggttcaagaccaacctggccaacatggtgaaaccccatttctactaaaacacacacacacacacacaccaaaaattatccaggcgtggtggtgcacgcctgtaatcccagctacttgggaagctgaggcatgagactcgcttgagcctgggaggcagaagttgcaatgagccaaggtcatgccactgccactctagcctggtcaacagagcaagactctgtctccaaaaaaaaaaaaaaaaaagagctaaaataacgtgttcaaggttacagaatctgtgagttatagagccaggattcaaacctagagagtctagctccagaggccacactctttgacaactcactacaataaagctgtgagaataaagacgtgtacttcctcacttaaggagatttcagtataccaggatagtgaggcatgaagactacagactattgtagagagggctgatctctgtcctctggagggctcaccaagcacagctctaatggatacacctcagcggggtggcttgtttatctacatcctgagcctagttttcccttcagacactatcacagtcgacattacttactgatcctttcttctgtgttcatcatttcccccaattagactcagactccttgaggtcggggatgacttcttataattggctctctacctgcatggtgaatggttgtcttagtcagttcaggttgctataacaaaataccttagactgggtaatttataaataacagaaatttatttttcacagttctagaggctaagaagtccaagatcaaggcactggcaggatccctgtctggtaagggctgctgtctgcttccaagatggcaccttgttgctgagtcctcacatggtgaaaagagggcaaaagacccagggagctttctgaagccttttctataagggtattaatcatattcatgagggctccatcctcatggcctcctcacctcctaaagtctctagctcttaatactatcacattggcaattaagttttgacatatgaattttgggggacatattcagacactagtagtggttaataaatacttttggattgattcactgttgggagaacactcaataagagaacaaattcaagtccaattttgaataaaaatagagttgaaaagttattgggtttgtgtttgttttttaggatgtttggtagcagatttccactttatttacatttggttaactgtgaagtcatagtgtttgatgttagccatatctttgatggcccattagggggcaaatgcttgtgtaaaccattcatacaaaagcagagaggggtccccactggatcccagagttaaggggtcaggaatcaccagacttggtggaaggggtcaatcttcggggagttggagagctatgttttagcctaatatcgtcactggtgctgtgtctggggtaggtcatttaacttctctaagcctcagttttcccatccatgacatgaaaggtctcttttttgtgggggtggacagagtctcgctctgttgcccaggctggagcacagtggcgtgatctcagcttactgcatcctctgcctccctgattcaagcgattctcccgcctcagcctccaagtagctgggattacaggcacacgccatcatgcctggctaatttttgtatttttgtagagacagagtttcaccatgttgggcaggccagtcttgaactcctgacctcaggtgatccacccgcctcggcctcccaaagtgttgggattacaggtgtgagccaccacacccggccaatgtgaagataattttacctgccctgcctactttttgtgtcaactgagattttggtaagtaaaagatcaggatgttatgtaaattgagagagaacatggtagaaaaggatagtgattaaatattttgtacttcatttgacattaattctgcattagaggcttattgtttgaaacagggcattgtataaacaccttttttttgctgttgcaggatatgttaagggcttctgaaagagggttttggtcatctgggttagctgttgaagaacaccaagtgaatgtcctcttttctctctaaataaatttccctctgctgggcatggtggctcatgcctgtaatcccagcactttgggaggcagagatgggaggattgcttgaggccaggagtttgagaccagcctgggcaacataaggagacccccatctctacaaaaaatgaaaagaaaaattagctggtcttcatagcacacatctgttgtctcagctacttgggaggctgaggtgggaggatcacttgagtccaggaggtcaaggctgcagtgagctgcgatcgcaccactgcactccagcctgggtgaagaggaagaccttgtcacacacacacaaaaaaaacataaaaataaataaaataaaataacatatataaaacatccagcccagtgtctcacatgtagtaagagtttgctggttgttatcgtttcacatgacagccatgttaggtttatttgcatatatgccagtcagtcctatttgattataagtcccctgggggcaggctctgagtgtacttatctttgtctttcttcttctggaactgagaactccctgaaggcagggactgtttcttattcttttctttttttgtttttttttgagacggagtctcgctttgttaccctgactggagtgcagtggtgccatctcagctcactgcaacctctgcttcccgggttcaagtgattctcctgcctcggcctccttaatagctaggataacaggcgtttgccaccatgcccggctaatttttgtatttttagtagaaacagagttttaccatgttggccaggctggtcagttcaggttgctataacaaaatactttagactgggtaatttataaataacagaaatttatttttcacagttctagaggctaagaagtccaagatcaaggcaccggaaggatccctgtctggtgagggctgctgtctgcttccaagatggcaccttgttgctgcgtcctcacatggtggaaggagggcaaaagacccaggaagctttctgaagccttttctataaaggtattaatcatattcatgagggctccatcctcatggcctcctcacctcctaaagtctctagctcttaatactatcacattggcaattaagttttgacatatgaattttgggggacatattcagaccctagtagtggttaataaatacttttgggttgattcactgttgggaacacctgacctgaacacctgacctcaagtgatctccccgcttcggcctcccaaagtgctgggattataggcataagccactgcacccagcccatttcttattcttgtagatatttgttcttagcaaacagcaggcacatggtaagcaacatagaaactaggttgaatgagtgaatgaatgaatgaatgaaggagtaaatgaatggatggaaacccacaaaaatgaagagaatggaaacccaggaatagagtgtgattccatatgcctgttatttttgcttgacattaattatcagatcttctctgctaggatcttggctgacatgcatttgctggagttgactggattatataattgctgttttctgtctctgctgtgattatgactgaaacagtggatacatttacggtgctacataaataataattattttaattatggtttgacctgtacaacatattctagcaacgtagctgactgtgcatttgtgtatgtgctcccttgagagtcctggagaagactcctattatgagggtacaaaggaatctcccctctatgcacatggtaattttacaattataacatggagaattacaataccactgtaattatagcaagttttcagaacaaaatggctttgaaataatatataatctagctgtattgtacatatgtagtataaaatttaacaatattttatttttggtgccaggaaaaatggatgtatggccatttttccagcttcctataagagtacaaaagtgacttataaattttaagtgagacttaagcaacatgatttgtgtaacatgcttaactaagtgcccagcatgtagtaagtgctcagtaagtattaggtaactgaacttaactaacaacaatgataaaaaaaaatcggtatcatttggtcatagtgtatctaagtaagcatttgatataaatgatggtgtctctgcattttaaaaatgatcctagggaactcagatttggtccacatgccacctgtaggccctcaccaattcagcgaacttttttttttatcccacttgtactgcataggggaccatgctaggcactggaggggttgaagaatggtttaggcccatggagcccatgggtaggacacaaagataaatatgataataactgctgctatgaaactgacaatgtagtgaaagagacaagacagtcatggaataatagaattctcactgagcacttactacatgtcaggcagtactctatgattttactcatgaaaaatcatttaatcttcacagagacaaggaaacggaggcatagagagttaaatagggtgttacagataagcagcagttgagattccaactcaggctgtctgatcagagtctacactcttgactgctatattatgttttcccctttacacctcacacctttagtgtgcaaatagcagttatataaatataatttgcagagaggggtaagagaactactgtgggtacattacagccaagatattgggactacttctccaaggagtgagattgagtaagaaagaacagctgcctagaggttttgactgacactccccatttccaccaagtctggggtagactactcctatgggatcccacaacaactataattacccctatttgagccctaagtacattttactgcaattgcctgtttatctgtctcttggccattaaatatataagctctttgacctgcttggacatatttgtatcctgagcattcaggagaccctcaagagttcactgagggctgggcagagtggcttgcacctgtaatcccagcactttgggcggcccgggcgagaggacctcaagcccagaaggttgaggatgcagtcagatatgatcatgccactgcactccagcctggatgacagaatgagaccctgtctcttaaaagaaaaaaatttactgatatgaactgtcaccatttttttccctgaaattagatgttttacacaataaaatgaatacagttaatttaaaagaccagatgccttgcagaaatgctcatttatatagtgctaagatttgttgagcatgtagctcaggatttgaaacagttttgtggctaaaaatcagtaggattactggagcaaaagtaaaccttttaaatgcatatgtcatggaggatgaatgtttcccaattatctggaaagttaatatggcattttaaatgaaataacaataaatcctccttctgctctcatttgaatgctctgtgcttttctattctattcacacataaaggatgttcagcctttccagtccagtaggaaatacatagccatggttgtcagacgggtgctatttaattgagtagacaatagagggaaaccaggttcacacaagagaggatgaccatatttcagaaatgaacaaaattaacaatttatgataattaatgtattctcaaattccttccaaggaatactatttttcatgttatcaaattctgcctccattgttattgaaatgttagaatattagaagcatattctttctcacaccaaagttactggcttcaggatctgagtcagctgatttctaagggcactctctcctggaaaacattagggtgctttttggagacatggagggctatgcgtttatttttaaaaattcatttcctaggccaggtgtggtggctcacacctggaatcccagcactttgggaggctgaggcgagttgatcatctgaggtcaggaattcgagaccagcctggccaatatcttgaaaccctgtgtctactaaaaaatacaaaaaaatagctttgtgtggtggtgcacacctgtaatcccagttacctgggaggctgaggtaggagaatcccttgaactcgggaagtggaggttacagtgagccgagatcgcaccactacactccagccccagcaatagcattaagactctggctaaaacaaacaaacaaacaaacaaaaaatgtatttcctagaagacacaaaccctcccccaggacttaagccatactctgcttcttcaagagccctctttgggttccccctgatgcttttttctcgaggctcctggctcacagacaagctctgagctgcctgtctatgcattgcttggtctgccactcaggcccttaccatgtccacttttggcaatgtttttcatgcatcttcagtgagtgtcaaaactccatccccaaaggtgatatttgacattattttggctgggcacggtggctcacacctgtaatcccagcactttaggaagctgaggaggaaggatcccctgaggcaaggagtttgagaccagcctggacaacacagtgagactcctgtttctacaaaaaaaaataataatagtaacaataattagctgggcatgatggttcgtgcccatagtctcaactactagggaagctaaggcaagaggattgcttgagcccaggtcaaggttgcagcaagccatgatcacaccactgcactccagcttgggcgacagagcaagaccctatctcaaaaaaaagaaagaaagaaagaaagaaagaaagaaagaaagaaagaaagaaagaaagaaagaaatatatatatataacacattgtctgaaatagactggattcattcattcgttccttcaaaaaacatttgatgaatgcccagtatatgccaagcactgtctggcaggcacaggcactagagtggcttatgaagtagtgaggctccttgttttcatgaactttatactctaaagagaggaacaaacaaaaaaaccaagcagatgagtatgtacctataaactgtgatgagtgccatgtggtagccctatgatgagaataagaacaggaaggaggggtcagggacttccttcctaaggacagacattaaatctgagataggaggggtagggaggaaggctagcgaaagggtgggagagaaggtgaatggagaaaagttttccaggcagaggaaagcagtgtgcagatccagaggtgggaaagagcttgatggattttaagaaggaaaagaccattgtagtaaggaaaaagagtggtatgagatgacattggagaagataggcagagccacatttaggtgtctgggttttgttttaaattcaatgggaagccatcgaaggccactaagtaggaagtgacactaatcagatttacgaaagagcacactgcccatgagaatggctaagattaaaaagacatcaaatgttggcaaaaatacagagcaaatgcaacattcatatctttccagtaagagtataaattggtataactacttgggaaattggcaatatctacttaagtatgcatatcccatgcccatcaatttcattcctaggtatatttcaacagaaatgcatacatacactcaccagaagaaaggcatgagaatactcatggcaatattattcataatagtcaaaaactacttgaaaactactcaagtatccatcaacagtagaatgggtaaataaactgtggtaaattcatacaatgaaatacttcccaggaataagactaaacaatctacaactacaagcaacaacatggatgaattgcatcaacaaaatgttgaataaaatatgccaggtacagaagaggatgcatgggatgattctacttacataaagttttaaagcaggaaaaaccaatcttatggtgttggaagttaagatagtggttccccaacccaaatgctcatcagtgacagaccgaataaagaaaatgtggcacatatacaccatggaatactatgcagccataaaaaatggtgagttcatgtcctgtgcagggacatggatgaagttggaaaccatcattctcagcaaactaacacagtaatagaaagccaaacaccacatgttctcactcataagtgggagttgaacaatgggaacacatggacacaaggaggggaacattacataccaaggtctgttggagtctggggggctaggggagggatagcattaggagaaatacccaatgtagatgacgggttgatggctgcagcaaaccaccatggcacgggtatacctatgtaacaaacctgtgcattctgcacatgtatcccagaacttaaagtataataatcataatagtaaaaagatagtggttcccttggaaggagggagtgtggaaggggcgtgagtggatgtctgggatgctggtcatgtcttatgtattgatctggcattggtcacatgagtatgctcttttatgtaaaaccactgagttatacaatatggtttgtgtttctttgtatataagttatatttcaataacatacatataacttgcataaaaaataagactttattattatttttttttttgagatggagtttcactcttattgcccaggctggagtgcaatggcgcaatctcggctcactgcaacctccacctactgggttcaagcaatacttctgtttcagcctcccgagtagctgaaatttcaggtgtgcaccaccacgcccagataatttttatatttttagtagagacggggtttcaacatgttggtcaggctggccttgaactcctgacctcaggtgatccatctacctcagcctcccaaactgctgggattacaggcatgagccaccacacccggccaaaaataagactttatgttttaataagggtaccccctgattgctgtgtggagaatgaattgccaaaggcaggagttgatgtaggtaagcaattggaaggtgattccttgagagaggaacctcttgagattaggtggatgccgtggagcaacagaggagtagacagatttgagagactcttggaaagtaaaaatcaataaaactcgctattggctgggcacggtggctcacgcctatagtcccagcactttgggaggccaaggcaggtggattgcttgaggtcaggagttcgagaccagcctgaccaacacggtgaaacccagtctctactaaaaatataaaaattagccaggcatggtggtgcacgcctgtaatcccagctactcgggagactgaggcaggagaattgcttgaagccaggaggtggcagttgcaatgagccaagatcatgccattgcactcaagcctgggccacagagtgagaatccgtctcacacaaaaaattaaaaattaaggccaggcgcagtggctcacacctgtaatcccagcactttgggaggccgaggtgggtggatcatgaggtcaggagatcgagaccatcctggctaacacagtgaaaccccgtctctactaaaaaatacaaaaaattagccaggcgtggtggcggacgcctgtagtctcagctactcgggaggctgaggcatgagaatggcgtgaacccgggaggtggagcttgcagtgagccaagatcacaccactgcactccagcctgggcgacagagcaagactctgtctcaaaaaaaaaaaaaaaaattaaaaattaaaaaaaaattaaagtggctgggcgcggtggctcacgcctgtaatcccagcactttgggaggccgagatgggcagatcacgaggtcaggagatcgagaccatcctggctaacacggtgaaaccccgtctctactaaaaatagaaaaaattagccgggcgtggtggcgggcgcctgtagtcccagctactcgggaggctgaggcaggagaatggtgtgaacccgggaggcagagcttgcagtgagcagagatcatgccactgagctccagcctgggcgacagaccaagactccatctcaaaaaaaaaaaaaaaaaaaaaaaaattaaagcttgctattggcctgaatgggagttaagagaaaaggaagaagaaagtaaactactagatctggagtctgggttactgaatggtggtgttatcatttgagatgggaaagtctaggggataatcaagcttgggtaaaaatctacagttcaggactcaaggcttcccatcatgtctattggtgcaaggctgattttagaggaaatggagaaaatcaaaatgactcagaacacctatagctttgccagctttgacaaggactctctggacaaaaagagggaacattcacattctaaagaattttcttcccaggatttcacagtctctcctccaactcttctccactcctttagctctggatctgacaagcaaactcctgccaccagaaaagtggtgaggatatccttgcattcctctctctgccagaaagtggaaaattcccgtgtcttctttttaggtcagagagtgttgcaattaaagagaagacttttcctaggataagaaggtaaggaaacaaaagtaccaaccagagaaaacaaagtggaaggaaaacgaagagtgttttctgagctgccggggttctgacccgaacaacacaatgttgaaagagctgcgatgctggagctgcagggtgcaggcgggggtgtccagggcaaggcaggagagggcgtcggggatcctatattatatggtaggcatggtaggttctgcagaggattccggcactcaagcttatagtcattgaacaactttgaataacacagtgtggtctgcatttcagaaggatccttatggtaagattgtggggggtgaggagaagaggtgaagattggagttgggagatgcagttaggaggctgtgaccatagtctggacaagagaaggcaaggacttgaactaaggccctggaggcaagaaggaatgaaagaaagacttggtgccaagaatgatttgggaagtcaatctggagatttcccagtttagggaactgggcagattctgatggggaggggaatgggctagtcaaggacaacgtccaagctgaagggacccttggaactgtgacatcaacaactgagataatacaggacaagaaggaggtttacaggagcttgaataggatttgttgactcctatgatctggtgagagcctaaatcctgtttctgcaaaagtcgtcattgttctggtcaatcgatgccccacccaggcactgagtcactggttccatgcatttgttcatatgctaatttgttcataaagttctgggaaattactttctatttcttatctccttgctgtttcttcctggtcaccaaatactcagccttgcacgtagaaggtactgtatccaaattaccttttgaatttagtggcttttatacagtttgaaccataatgctaggaaaaggacacaggaagccaggcgtggtggctcacgcctgtaatcccagcactttgggaagtggaggccagcagattgcttgagctcaggagctagagaccagcttgggcaacatggccagaccccatgtctacaaaaaatacaaaaattagccaagtgtagtggcacatgcctttggtcccaactacccaagaggctgaggttagaggattgtttgagcccgggggttgaggctgcagtaaactgtgactgcgccactgcactccagcctgggtgacagagcgataccttgtctcaaaaagaaaaaaaaaaaagacaaaggaacactaaagcccaccccatttagatgagaggagaaaaagaatgttttcctttgagttctttggttagcaactctgtccccattatgtgcacataagttatttcaaatggcaaagagcacaatgatgtttgagatatcattgctgagagccaggagggtccctgttctttccttatctgagtatgacagtagcttgagtaaatcagtgacctctgctactcagtttcttttttttttttttttttttttggagacagagtcttgctccatcaccaggctggagtacagtggtgccatctgggctcactgcaacctctgcctcccaggctcaagagattctcatgcctcagcctcttgagtagctgggattacaggtgtacaccgccatgtcaggctaattttttttttaaattttagtagagacagggtttcaccatgttggccaggctgatcttgaactcctggcttcaagtgatctgcccacctcagcctcccaaagtgctgggaccacaggtatgagccagtatgcccgaccttctactcagtttctgtgtgcaaatggtgatagaatgctgccctttctttccgtggctgtgaagagcatcaaataagctcatatattcagatatgctttggaaggagtaaaatggcattggaaataccgggccatgtaaaatggaatagcaaaactaaactgaaaggaaatgacctgtatacttctattggtccatctggattttggaagtatcagggtaattgaaatatttatttttcattcaaccttcaggtaaaatgtagacccagctggtgtttatcctctaagtggtgtgtgtaattgcacgtgtgacacaaggatgagctatttgtcacacagctttagaatgaaacttgaaaaggtcacagagagggctgtgaattttaagctgtgctccaagatggagtgctaagcagcacctatcagaaaagctcttcctttgtcctccaggtggggtgaagagggaactcttgaatctccaatgccactttctcaggttctattggtggcttcagtgaaagcaaacaggactcagacaggcagataagataaccactatctgaagtgtgagcctgcagttttaaattgccttttatttggaaataccttcaatctcatttggatgctaagggaaaaacttaaatctatcacacacagccctagacaacttgtttattaaatgtgcagaataaagatttgatgcgaacttctatggcaataaactaggttcatgggtgggtattaggttaaaccaaatgaatcgctgacattcaagggatttttggctgcaacagttacacaggccagaactgcctaatctaatccaggttctgtcactggcaaatgcgaatcacctacaggaatctttgacagaatttatattagtcattccttactttttgtgtgtgtgatagtctggtgtgtctctaattatctcaaaatgtattgaagtatatcttaaatcaagtttactttcatgtatctttacaaataaaaatatgtcattgcactcttatttagtacaatacgtgttagagaatgaacacaaagcttggaaatcatcacgatcatgcctgaatttgaccagaatagagacaggcattaaatccgaattatcaatatttgtgtgtgtgtgtgcgtgtgtgtgtgtgtgtgtgtggtgctactggtgtctgtagcaacataactcaaccacaaatacatgaatcttgtagttggataaatcatttttgttcagccaacctttattttctcaagtgaacaaaatgcagcttccctcaataatatcaggtttttcacagggctgccatatgatattatttgataataaatattttctataatgcatgcttgttttagaatgttatttttatggaagagcttcagaaagttaaatcttttaattccacaacgaaggctagtctgtcaaaatactgttttttgtgataataaatgcaaaacctactatgccatttcttaccagcagccaagatttttttttttttttaatgtttgagaatttcagcagttgatgcaaagtggacattatgagccacggatctatgttacaggagccaattttagacattttaatttgagtggaatttaagttcagctcctcccttatctctttgaagttgctggggccctgttgcattttaaatctactcaaaagtgcccataggagcaagactcaccagtcgcagccactgatggagttcatggccacccctctccctgctcctgtccctatgcctttgttcatgcagttccctctagaagaaacacaccactggtcgttcttctctctctctctttttttttttttgagacggagtctcactctgtcgcccagtctggagtgcagtgaaacgatctcggctcactgcaacttccatctcccaggttcaagcgattcttgtgcctcagcctcccaagtagctgggactacaggcatgcgacaccacacccggctaatttttatatatttagtagagacggggtttctgcatgttggccaggctggtctcgaactccttgcctcaagtgattcgcctgcctcggcctcccaaagtgctggcaatacagatgtgagccaccgcgcccggcccgttcttcttacttttttttttttttttttttttttaatgagacacagtctccctctgtcaccaggctgaaatgctgtggctcgatctctgctcacggcaacctctgactccctggttcaagcgattctcctgcctcagcttcccaagtagctggtattacaggcatgcgctagcatgtccagctaatttttgtatttttaatagagacggggtttcaccatgttagccaggatggtctcgaactcctgacctcgtgatccgcccacctcggcctcgcaaagtactgggataacaggcgtgagccaccgcgcctggcctggttcttcttactcttaaagacagctcagacagcagcccaagaagccccccgccccgccccccaaatctcttagtttgggtaaagcgccccgattccgtgtggtcatggctttatatttgtccctcttcctgttcaaataacttgtgcgcctatatagggcctggcccgcggtggaatggacgcggctgcagctggaatcgcatcactccctcctcccctcccccagcactgacatacgagccccagtgtcctgaggatgactccaaacagcgtcggaccttcaagtggaacctcaggcttgttaaggagtggcctggaactgcaccagattttaggggtgcctggggaggcttagagatgggagacgccctgacttggttcctttccagaacatttgggaacacttggcttggtttcagtcaccaaatgcggactcgcccagggtggacttagttctgaggtggcctcttgctccctctagtggtttagaaatcactgcaggcgggttaaagacgggtctggtttttctccgaggaggaatccgcattaaccatttagacatctactgcgcagtgaagtcaattcatgactacgtttttgagcaatccaataattaaccaaatgcacacacaataaggactttggaccgtcttgtggatccttggaggaccttgggttcattttacaatgcaaacctaacaggctgtaagtacccaagggataattgaaaatatgctttaatcaaaggcaatcaccctgtcattgtcagcctgtgaaacattagctcgtggagcgggatgagagcacgcagttctcttatcgctccaagataactccaccaggatgacagaaaagcatcagatttggagatgtcaccagtctggagtctcagttacattcaaatttcatgatagcctatccttggggaactgaattgtctcttttgaacaaagacaatttcttagttgagtgagttcagtcattttttgattcaatatcagatcattacagttcctttgggacataaaaactatcgtttccagaggcagaggagtgtactttgctatgtttgtacctgccctacacacaaacttcttatgcaacatacattttctgaatgacttaaaaataatagctgaatatggcatctttcttcagaattgcacgaagctttaaatatcacctactgtggggtgcagcggcgcatgcctgtaatcccagcactggtaaggctgtaatgggagaattaggctttgattttcggagtttgaaaccagcctgggcaacatagggagacactgtttcaattataaataaataaatatcacctcctcagagaagatttcctgaggcagcagaccagcttgggcttcccacagtgacgatggcctcccacagcactgggtgaccacagagcactagtcacgcctgccatttaatgagggcctggtttgttttccgtctgtctcctctgtccaaagctgagctccgtggttggttgtttgtccatgacagcatgccagagtctagcgcagtgcctggtataagaggtgctgaataaatatttgtcaactgatacaatctaggggggtaaatgctgaggagacagacagcagaggagagctggtgctgttttttttttttttttttttgagacagggtctcactctgtcacccaggctgaagtgcagtggtgccatctcggctcattgcaacctccacttcccaggctcaagcgattctcctgcctcaggctcccaaacagctgggattgcaggaggtcaccaccacacctggctaatttttgtatttttagtagagacggagtttcaccatgttggtcaggctggtctcgaactcctgacctcaggtaatccacccgcctcagcctcccaaagtgctaggattacaggcgtgagctaccgtgcctggcctgattcttatcttagggctgtgagggaacccttcattcagattataagcagaaaaaaatacctgattaaagactcaggaatagtgaggtgaagggctgagattagcacccaggtggccagtgcacatctgtaaccacagtgcagcgaagaggagagaagcccagaattcccccactcagatcccaagtcaagcaggaatcaccatctcctggctcgtggagctacatttctttgtcaacggcctgatggaaactggcctaagctctgggggatggtttaccagcaggactgtcctattatcttaatatgtgtgggatgtttaccttaacaaaggcattttttttttaaacaggctggagtgcagtgacatgatctcagctcactgcaacctcagcctcccagactcaagagatcctcctgcctcagcttcccgagtagcagagatggcaggtacatgccaccacacctagctaatttctctacttgtaggtgaaatggggtttcaccatgttggccagggtggtcttgaactcctgacctcaagtgatccaccctccttggcctcctaaagtactgggattacaggtgtgagccaccatgcttggcctctaaaggcatatttttaaagcactgaaaattaaacaataacaaaatacctggaagctctggaggcaacaaagacagaaggccaaaagtgtgcagactgtaagaatagaatacagagtaagggtaagactataaagaggaatgaaaatatgaggccaggagaaaagatacggaaaagagaacgaatgtgttccttcttgtgtgtccttcagctttccttctgtatcactgactatccaaagaaaaatttagttaaacaggcagcaagtatgaattgaatgctgggaaagacacacatacatttaaaatcccacaggaaagttataaatgtgagtaggtcagcagagaggcacccagccttggtaggcctcctgggatgttatgtagctgggtgtgtgttttcagccctgctataccccagatttcatttttgagtgagggtgattgcatttggagttagaatgagtaaaccatttttgactttattagttaggattgttaaggttggctgtaagtaatagaaaaaaaaaatcaaaataagtggcttaacaagagagagagaaggtagaattttaggccaggcactggcctaaatttgtggctcgcacctgtaatccaagcactttgggaggccaatgcaggagcccaggaggttgaggctgcagtgaaccatgatttcaccaaggcactccagcctggacaacagagtgaaacccggtctcaaaaaaaaaaaaaaaaaagaggccaggtgcagtggctcacgcctgtaatcccagcactttggaaggccgaggcgggtggatcacctgaggttgggtgttcgagaccagcctgaccaacgtggagaaatcccgtctctactaaaaatacaaaaaaattagctgggcgtggtggtgcatgcctgtaatcccagctactcgggaggctgaggcaggagaattgcttgaacctgggaggcggaggttgcagcgagccgagattgcgccattgcactccagcttgggtgacaagagcgaaactccatctcaaaaaaaaaaaagagagacaattttctctctgctggcatggccgactcatgagggcatctcagaaagacaagaagcccaagaggtcaacctggaagtttaatttggaccttactcatccagcagaagatggaatttttgattctggaaattttgaacaatttctacgggagaaggctggatatctcgggaatgttgttcacattgaacgcttcaagaataaaatcacagttctttctgagaaacagttctctaaaaggtatttgaaataccttaccaagaaataccttaagaagagcagtcttcatgattggcttcgagtggttgcatctgacaggagacttacaaactttgttacttccagattagtcaagaagatgaagcagagtcggaggactaggcaaaggcttcccttatagggctttgctgattaataaaataaatgaagtatatgtgagaaataccaagaaattggcttttagtttatcagtgaattttaaaaaatgcacccttaaaaaaaagagagacaattttatttctgttacattttcaagaaggcaggaggtagcttatcaaggtttgtttggggcttaagggtgagggatcttctacttggtagtaccacagtgctcagtttcccttttcaaggtggcctcatagtctaaattggctgctgaggccccactcacacacctgctttctactcagcaagaagaccagactgagaaggatgcatcctttttttaaagacgctttttagcagttgcacccacaactcgtgcttacatcttgttggccagaacttttcttcatgacacatcgacctgcaaaaaagttggtgaaaggaagacttctgttccggggggaaaaaaaacaaactaaaattaaaaatcaaggactctattactgagaaggaaaggagaatgattactggaggccaatatgcaatatgcaatctacttcactggaattgaacatatatttttttgttcctgaaaatgagtcctgcctcagtctctccagggcatggtgaggggtgggagtggtagctggtagaaagctagtgtccttaagacaaggattggctttaatcctgctttgggtctttgggtgatttgaaatccaaatgtggatacaaatgtctactttttttgtttgtttgattttgagacagggtctcactctgtcacccaggctggagtgcagtggcatgatctcggcttactgcagccttgacctcctgggcttgggtgattcttccacctcagcctccccgagtagttgagactacaggtgcctgccaccacgcccagctaatgttttgtatttttagtagagatggggttccactatgtcacccaggctggtcttgaacacctgaactcaaggaatccacccgcctcagcctcccagagtgctgggattactggcatgagacactgcacctggccacaaaagtctatttaagagtacaaatgagggaaaaataatctagttttgccaattatattatcactaaagctcttatgttgttgtaaaaagtcaccagacatattgtataatgtcacatccgtctttctttctttctctctctccttccttctttttttttttttttctttctttcctccctccctccttccctgcttccttccttccttccttctctctctctctctctctctctctttctctttagagacagggtcttactctgtcacccaggctggagtgcagtggtgtgatcatagctcactaaagccttgaactcctgggcttaagcctcctcccacttcagcttcccaaataatgttgaatttagatgataagtttacacaggtctttaaattcaaccaactctcatcctatggattcagagacaacagctgactatccaggagataaagattcctggctgttccttctcacaatcttctttgcttattggaaaatgctggagttaccccaaattctgtcctgtttctttttctttctctcattttaatccttcttgagctttttcaaatgtgtcatgtttaaaagtggactcatcctttcttttcttttttttttgttcttctttctttttttttgagatgaagtttcgctcttgttgcccaggctggagtgcaatggcgcgatcttggctcaccacaacctccctgtcctgggttcaagatattctcctgcctcagcctcccaagtagctgggattacaggctaccagctaattttgtatttttagtagagatggggtttctccatgttggtcaggctggtctccaactcctgacctcaagtgatccgcctgcctcagcctcccaaagcgctgggattacaggcatgagccaccatgcccggcccatcctttcctttctaacccagttcctggttgtccccctgctgagtagacagcaccagccatggcctcagccaggcaccccactctccctcacagttcacattttcagtgagtgctaggctttctacttccttctctctaattcactcttcattttctccaaactcctgctatcccccaggaacagggaagcatcctctcttgctagattatagcaggagcctccctatctcctgagatcatccaggctgatcttgctaaatgttcaactctgttcctgtcttgcccctctttaaaccatatacttccatagaattaagcccaggttcttttgtcaattgttttcctttttattaattaattaattttttttttgagattgaatcttgctctgttgcgcaggctggagtgcaatggcgtgatctcggctatccacaacctctgcctcctgggttcaagtgattctcctgcctcagcctcctgagtagctgggaccatgggcacacaccaccatgcctggctaatttttgtatttttagtaaagacggggtttcagtgttggccaggctggtcttgaactcctgacctcgtgatctccccacctcagcctcccaaagtgctgggattacaggtgtgagccactgcacccagccttattattttttagagatggtgtcttgctgtgtctcccaggctggagcgcagtggtgcgatcatagcttacctcagcctcgaactcttgggctcatgcattcctcctgcttcagcctcctgagtagctgggaatacaggtgtgcaccaccacatctggtcaatttttaaattttttgtagagatggagtctcactatgttgtccattctggttttgaacttctggcctggaaccttccatcgatcctcccatctctgcaagcctagacatttaacatggtctagaaggcctccatgagctccatctcacctcttttttgctccttccgctccggacctttacaagttgtggccattccaaactcctttcacttctgattatctcatgttctctctcacctccccgcccatgcaatgaggttcctccccaactagattcttattcctcttagattctcagagaagccttccctgaaagaagccgtctcccatctcccagattgggttaggctcctcctgtgtgctgacttcattgtctctctccaacattgcttagaacgctaagttgcaactttatgtctaattgattgctccactagtccataaaatctaggaggaaagggctgtatccttagcccttgacacatggccttgtacatcttaagtttgcatatgaaccgctttatttacctgggatattatcttacttaatccccaagacaaccctatacgttgtgcatgattattccaatggtcattactgttattttaaatagagatgggggctcactatgttgcccaggctggtcttaaactcctgggctcaggtgttcctcccaccttggcctcctaaagtgttaggattacaggcatcagccaccatgcctagtcgattatgccccttttaatggatgagcaaagagtcgaggttccactggttttccactgcagtgtctctgctgaaggattaaaaaaaaaaaaatcacagggctgtgctggactcctgggacttccagaggacaagtccctctcttcagtgaggctgacctacacagagccagccctccttcccctcccagccacagctgtgtgttggaaagctagaggcctgggcccctaataaagagcagacctcccaatctcctcgttccttccccctcccctcatatggtttttcaaattaaaagcaactaaaaccaaagacctaaggagcaggagagggcagaggcacaacaacatccctaaactgaggaagggggctctctagcgagggagggggtatccaaaagccagatccagagggttccagtcctaccagtctgtcccaggctctaaggagtgtatggcccaccgggctgggctggaccaggaaacaagctcttgtcctcaggtctgtaaacaggctgcgttgttaggaaccctctgcttctacttcctgaagagcaagccccccaaacccagaagagaggctgcaccttgagatccagccagcaaggtgggtgcggagtcctggggagggaactttcacctcaagctgcacagacccatctcgatctttttagagaattcctccttttccaggactagtgccgttctgaattctgagcgtgcaaagagactccttagagctagcttccgagcctcagctggggcagaccagaggccagggcgtctctctgtctgcggggaccccccacatctgtgcgtcacctccaccacctccgggcaaaggacccttcctcgctggacccagggaggcggctattccagatgcagccaagggttaaagggggtgggagaaggagcagttagcaccgttttcttttgcaaaccaccaaacgggcccttcattttcaaattgtgaagccagaaacatcccccgttcccttgccccgcccatcaccatttgaaaaaaagaattcacaagtttaaacgtgattttcacaactaacggctttgataactgttaaattcgtacggcttctagggcaaacggacctgaattcttcaaggaaagtagaattggcggtggagctggggggcagaggaggagaagacacaaaaagccaactcagtgggaagcgccctcaaagccaaaggtgtggcgctcggagctgtggccgccctcgcccgggagtcggggccaggagaacgggccctggaggcagggcagggcacggcgagattttgcttttgtttttagtgaccattttgatctggttgtaaaaagtttacgaggccttctttttgaaagtcagctaatcgactgcacctttttatacccttgccctcaatttcatgtcgcctgctggcctagacgcgcaaggcggaggacagaactgtcacagtccctacccttttctcccaacttctcggcccggctcaattcgggagttgggcctccttcctctcggctcgcagcctccccgactcccactttggggagaaaacccacattcttaaccccttgataatccctcaaggaaaaaacaaaacaaaaaaccccaagaggttgaaaattagaatccgggcgcgggttgagatctgcgcagagctgcccaggccagtgcatgtcgctcctctcctccgggtacatatggtggcctggtcccctccccccaccccccacacggtgcccagtgagaagcacaagaaggggagaaaagacccgcagcccgcctcaggagggcaaggtttctagccccctgcggctccgggaccacccaggacccggggcgtcgtgggaccgatctcgaaggatcttagaacgacactgggagagcgcggcaagaactagccccaccttcccccgacgccccggactgactgccgggcgcagacccgacttctcccgaaccagcctcggaccagccttagaaggcggaaaacaggattcaaacccgcctatgagcagtggtaggggcgggggctgtgggggcaggactcggtttaaggaaccaaccgcctcggttcgagggcctcctgtccggaggttgctcctgaccactgggtttattttgcttttgcagaggaggcagatgttgacctctcttctttgcacagtctctccgcaaaattttcccccaaccatttgctttcttgcgccaccccccaccggggcactatccctggagtcagctcctcaggcctttaaaccttccagaatgtcacacatggaaacctttagcaaatgtttgttaatgatcataacaaaggcatcattcaaattaggcaggtaattactaccagaaggacaactgggtgctcgcttgctcatccattgctttctgctttaaactcccgaggagtcgctgcctggagacactcccgcccggactgcttctcgggccccattaaacggctctgaaatgaactgtgaagttaccatttgtgggcggagagcgctggggccctgcggacggaagaccctggcttgaccggactaacagtgtcgccgaagcaaagcagcccctctgggtaggctgtctgtctcgcctcctaccctctggggcaactagcctaaaaacccggttctcaacttaacagcatgtggcccagcacccgcttttgccttttattccgcactctgatttttggggggatcgtttgttcccgctcattttctacaaacattacggtatcctgttagcattccgaacaaggggctgttcatatatttgccttcaatgatttcctgaagggacatgtggaagtaatagcgagcggtgcagtcacccaagctgaagatgcacgagagcgggtcgcgtagaagaactgcggcaatgggacccccagcgcagccccaggcgccctgttttcgaggctgacatcccaagatcctgtcctggttaggcacagcaccgcgcccgttggagtacttctctgtgactctcccctgtccactgcactgtgtccaccctcctggtgaaggaggagacggctgttggacatgccagtcccaacctggccactttggccattttcagagtgcgtgtgttggggtggggttgagggagaaggatgaaggatgacccccaaccccaacaggagaattcaaaaatcagagagcgatgaaggtgaacgcgctcccctcccccgctgtcgctgggaagccccactctgcccaggtctggttcctggagcatcagcgccccctttccctcgccggcaggatcgtttcctcccgacactggcctctcgccttgggcgcagggtttggggctcagctgtcaattccaaggaattcgtagggttcgacccacgcggcgggagggaacggagggagaatcaaaaggcatcctcccccacgacgcggaggcggtggtacgattcctcaaacgcccaagcttgagctttttttgtatgcgagatagaagccagggcaacctcgcccagataaccccgaaaacaaaggcacgaccagataagtgacttcaagggagtaaaggtcgttctatcggagaacgttccaaacctacacagaccctcttttctttgtaccgtatttcagaccacccagtcttgtacacacacacacaccacacaaaacaaaaacccatcattgtcatattggactcaacagtttgcccaatcctattaaataactagcaactatatagcccttcccctaaaagacccctagttcaaaacggcgcaaccgcttggagatttctcccgagggccctatttctcgttgggccgagtttgtagaagggacatttcttgattctagatttatattctctctgggtattaaatgcaattttgtatgttccttttcttcttttcaaagagaatacaaaactatagcagtctaagaaaataaccccaaaatggggaggcaaactcattctggaaatgatgggctgtttgtagtttcacaaaacctctttcccggcagagcaccaacacctcccccttccaccaccccccatcccatctggtctgcttctccccgccccccagttgttgtcgaagtctgggggttgggactggaccccctgattgcgtaagagcaaaaagcgaaggcgcaatctggacactgggagattcggagcgcagggagtttgagagaaacttttattttgaagagaccaaggttgagggggggcttatttcctgacagctatttacttagagcaaatgattagttttagaaggatggactataacattgaatcaattacaaaacgcggtttttgagcccattactgttggagctacagggagagaaacagaggaggagactgcaagagatcattggaggccgtgggcacgctctttactccatgtgtgggacattcattgcggaataacatcggaggagaaggtaagggaaaagaaaaaatgattttttgtttataagggaagtccctgatcagactctgggactggagaaagcgaagtaacttcaaactttgggcgacaagaaaaaaaaaaaggagctggattccagttgtgtgtccagagagtaatttttttttttcggaataaacttcacttggggacgggtgggagataaccatagagttagaaagtctaggtattttttttaaacacacattttccagacctatttttaaaaacaatgtttttctaacaaccctatggcctcccaaagaaattgtttaggcttacatttttgaggtttcttttgggagtgggggtggtgttcgtgaatactgggccgaacaccaaggaactgggggtggaggcagaggtgtttgccctcttcttggcagtgggtcctggaaggcgacaggttttaaatgagtgttttcattcctcgcctgcggtttggcgggacagcgctgcagcccatggtgtggagcgcggctgggggaccagggggaggtggggagaggggagcgtggaggggagcgtggaggggggcgcgcgaaggggttgcggggcgcaggaggcgggctgggctcggctggagaccggacctcggtgttggcctacagcacagggagccggccgaatgcgcgtgattactggacggcgctgctctgggagagagtcggggccagatttggcgcggcggtgaggcggctgcgggacaagcagaggcgcgcgggcgtgggcaagggtttggggcgctctggagcggtttgttgggtcagtgaggtgccagggagagcgggtgcctgccgggcagtgtgctcgggttgcacgccctagcgcgggggcgacagcggcggcgcgggcgggcggtctggaataatgacaaacacatttggccctgagtgaagaagtcgtcgtcgcctcgcattccagcaactgggatttgaggaatttcgaaccgcacaccaaggggccctcattgtgctccgtggcccccgcccccgcctgtcttcccgcgccccctcctcggtggaatcatttctgcattgcccgggggctctgctttcgctcagttctggccgcaggcaggaagagaggaaaggtctccaggaaggtgccgaacttcttgtgaggaagttagggacgacttggaactggggaaacttgtttgcaggtaagacagaaaggtgggaggtaaaccatattctccctccgggcacccgagccctggacaccccctacccggcacccttctccgcgcgggggtgcgtggcacttgccgtctgagctcgcccagcgctgctcggtcctctctagttggccttttttccattcctctccctgccggcttcagagccgtctgtgcgtacttctccttcctctgctgtctacccccatggaaaccagatttacacacgaaattaactccgcccggctgcgcccagggagcgggcggcgtccatttggcattgaatatgtgggatcagctgttctattccgggagggtgtcggccaggtcggagcgacgagtgtggcccaacccgagtacgttgccagagggagccaggagcctgggccgggccaggtgtgcgagagctgccgatggcctggcctcgcgtcttggtcgggaaggacttgctggcctggcaggctgtgcgttgtgcatccctcccgcagccagagcgccggtcccgcacttcgctccccgaattgtgctaagacctcaggatgtgcgcaaggagtgcctggaagaacttgccactcactccatcttcctgggtgggaggcaagcatggatggggcccatatcaggtccctaccgccccgcgtccgaaaagccgcgggctgggcggtgtgggaaatggctttttggctccgaggccaaattgctcaatgttttggaccgactcgcctcgccgcggtcgctcctgacaagaactagacagatttttggagcagggagcatccagggcaaacgcacgacagtcctccgcagtgcatctcaccggacaaacatccccggagccacaggaggggaggaaggggctctccgggcgtgcgcacctccccagccgccgcgctgtcccatccccgacccctaatctggtcaacctggaccccggcactgctgaattgcatcccctcttctccctttctcctcggcctcctcctttccacaaccctcaagatgaggaggccctgcctcgactccccgacaggcgcaaggccgaccaggctcgctttgacgccctggtcaggccctgcttcggagcttgcagttttgggttgacccaagtgcagctggacctcgttcacaagagtgaggggaagccaagaatgaacccgtcgttagcccccggtgccctggctcttgtttaaatccttagatcgagaaggacttgaaggagatcccaggctcccagctctgcgcccctgggccagtttcctctcgggacgcggactgaggagggatgcagggggaggggcattgggccgggctttccagctgcaaacacgtctggcgccgaggcgggcccattttgtgcctcctggggacggaccgtgggcggcgcgcagcggcgggacgcgttttggggacgtggtggccagcgccttcctgcagaccccacagggaagtactccctttgacctccggggagctgcgaccaggttatacgttgctggtggaaaagtgacaattctaggaaaagagctaaaagccggatcggtgaccgaaaggtgtgggtctcagggttccccgggtctaactcgccgggtccaaccgcagcatcagccttggggcggcagataatctttcggtctcgcctggggcgcaagatgcaggatcgggggcaaatggcttctcccaacttccccctaattcgggttctgccagatggttgtcgtttgctgaagtggctcggcggcatttccttttgttttaaactgatcaatgagcgaacctgggatgggctgaaaaagtagattgtaggagggaataatgggaaacccgacttggggcgcctccttccctgcctcctactgcagtttctcggcccccgcgaaaggggagcgacaagcgcgggtgggcgcggactcttgagggggcagaggcggctatggcgcgtgtcgggcaaggtggcaccagaaggcacttttgtgtgtgtgtgtgacaagagtctcgctctgtcgcccaggctgaagtgcagtggtgcgatctcggctcactgcaacctctgcctcccaggttcaagcgattctcctgcctcagcctcccgagtaactgggattacaggtgcccgccaccacgccaggctaatttttgtatttttagtagagacggggtttcaccatattggccatgctggtctcgaactcctgacctcaggtgatccgcccacctcggcctcccaaagtgctgggatttacaggcgtaagccaccgcgcccggccaggaacggttcttaaatgccgagagggcgcatgctagctctcctcagcattcccggtgagccgctacccacggccgtgcggctctcgtgcccataggaggcgctggcgagctcctgtaaccctaaacccctcggcccctttccccccacccgcccggattctcttcccgctctcccccctctctccacacccgcccggccccctctcgggtctcagttgaaaacaatgcaaacgcagagcgtcgtgcctggggcgcagcggcctctgcagctctgaggttcagagcgcggcgcgcaggggcgcaggggcgcaggtccccggagcggctgggcatcgccgccaaccccgggacaaccaagccgccgaggacttggtggaggtgggagggagagcggaccgcgcagtgttcctctgggtcccggggtcagaagccggacagtggcgggggctggacagtccgagcgcagagcctcccgggcgaagtctgcgcgcagcactcccggctgcgctgtcggggaccaggagcctgggctgcgggcgagctagctggcgagccgggtaagattcgcggggctgtcgcgccctctagtgggctccggggacgcatcccgctttccccagccccgggcggtcggcgccgctatctcagtggagcgcagcgctggaaccccgggggcccggagcggaggctaatctgggtcacctttcccctcctccgggcagccagtggactcctcgcaggctctgtgtgggcccgggaggcgccgggtggacgagagggggccgaggtctctgggtttggattgagaatgggacgtccttgtaattcaatgtgggagaagcaggggagtgtggaggaggacgggtcccgtgcgttcttggggggcaggcgccgtcttctgcgttccagcccctcgccagctcccttgccccgcgggcggcctgttgctgtttgtttgttttacgaccctgcgttattgtgcaacggtaacagtcgtttccaatcagctgcgcggccgtcgcggccctcgccaggctggtttatgggggcggcggtggcgcgcggacagataggacagcgcggcccgggaacggcgtcgaggtccaggcggtccccctgccccgagggggcggaaatgctgaggtggcgagagcgtgggttgcacagaaccctagtagcgagtccggctgagcctctgcggcctagcccagcagcgtcgtcttcccggctccgaagacgtcttcccgaagccccgctgccccggcgcaccagctcccggtgatggggatgatgatggggatgatggggagatgtccccgaattctcctggggtcccgaggagatttagccattttcaacagcagttttcctatttctgcttaaaccccgcgggctttcaactgaggtcaccacgaaagctaaaagtacaacctaaggaaggaagagactggaaattaacatttggggtagtggagctcagaattcctcgcagcggcgtctgtgtcgcaacccgtggacgcacgtccttggaccaacactgccatctgctggccactcgtaagaactactgcgacccgctgtgagaatgggcttcgcggagaccattaggaaggtgctttattttttattttttatttattttttgctcagtaggaccgtaataggtgactgattttcttttgctgtgaggctacaagaattgctggaagacaacatttttatttcgtggaaatttgtgttgtgtttctccttggttgttaatgctttgcatttacatagtgaacatcttattatcagagctggcctgtgaggagggtagtgggggggcattgatgttcccgtttctgagtgaggagacctatgtcggggccttggtgacctcaagccgaatgctcaaactgctactgctactcctaaggttgtgccattaggagtcacacccgtttggtgatattcaaaaggatatgtcattttattctcccgtggttaaatatatggtgagaggagagcaggcatgtttatgagcccagattgtcccataaaaggctcctgtttaaaaacactccagccccctcccattactggaatgtctgatggagctccgggagatcaaaacaacaaaacaggctctggtagggtgcagaggtcctggtaaacacaccctctgctggaaaacagggagaagtttccaccagtgtagacctgcacttggtttgcctgggctgaagttaggagactgcgtagaaaaaggaaaatgtgtaattttcacagttagaattaacttaggagagctgaaattaactgagcctcggaaatctgaatcttgaagtcaccagtggcttttggggctgtgagagagtctcctgtggtctttaatcatgtgagggtggggtgaaattcaatattcagtggttctgcaatgggatgcactgtgcaattggtgattgagaagccaactctctggctttaggagaagaatgtcttgctgttagtccttctggaaatagagccttgcattgcctactgtctgtttacactacctttgcacattgcctttggttatagagtcatgtccaatggctctttacttctgtttgcagggcaggagatggcaccctgttaaagagaaaggatagtagctgcaaagtcatttgtttctctgtttctgtgactgtatatattggctcatctttgaatggtctttatagccacaccaggctggaggtaacagggtcatgggagtggactgctggtgtgggctgaatcagagttcagatccatgtctccaggaggtaggaggtgcagggcaagtcatgtggcttctggggcatccctcactttcttagttaaggagaagttgaaggagccgatctaaaatatcttgggagtctgcagaaaaagtcgtgaaaatcaaagcactttcaattaaactatataatttagtccttacaagaatgccacagggcaagcaaccagtcaggccttggtagtcgtgcttcctagaagaaaagactgaggttcagagagttggatagagtatcagatttgggatcagtggctagtccaatgtgatttccatcctttcttctgagagaaagcataagaaggccaagaggatggtggaaaagcacaagtcacctgcctgagagtcaacagggcggggggtctctttctcagtttgttcctctaagttatggcaaatgttttttgagctgtgattattgagaatgggggctgaagttcaacatgtagttggcatgagggaagtaattatgattgaagaaaagatttgggtgaaatctagtgttcttccctgcaaagggggttgttctcacggattcttatggtgccatgtttctcagaatttgtagtttcagttacttatatttgcacacctgactttagatgagctccagaatagcagttactaattaaggatgagcatttagagtagataaaagtggcaggaacagcaagactcactcccagagagcctcactacaggtctaataggtgaggaaattccccatgtttcccatttttcttcattacctccctgtggggcaagcactgccattattcatgagtaaactgtctgagttatagataagtaatgacatgaaacttcacaaacacgctgagcacagtggctcacgcctgtaatcccagcactttgggaagccgacgtgggtgaatcacgaggtcaggagttcgagatcagcctgaccaacatggtgaaaccctgtctgtactaaaaatacaagaaattagctggccatgatggtgggcacctgtaataccagctactcgggaggctgagacaggagaatcgcttgaacttgggaggcagaggttgcaatgagctgagatcatgccactgcactccagcccaggcggcagtgcaagactccatctaaaaaaagaaaaagaaagaaagaaaaaagaaaaaaagaaagttcacaaacaggcctgatttctacccagggaaccactgttatcagagattggggtttggaatcttaagcaacaaacacatgtttattctcttccttcctgatggcttgctcagaggacctgtttccattgcccactttttttttgagacagaatcttgctctgtcacccaggctggagtgcagtggcgagatcctggctcactgcaacctctgcctactgggttgaagccattctcctgcctcagcctcccgagtagctgggattataggtacctgccgccatgcctggctaattttttgtatttttagtagagatggggtttcatcatgtcggccaggatggtcttgaactcctgacctcaagtgatctgcccacctcagccttccaaagtgttgggattacagatgtgagccaccacgcccggcctcattggccactttatatgtcagtaaataatctttcctggcagagggtccactgtatctggaggcactgaaggaaatctgggagtgtctggccagggcaaagcactgcttagagcttgcacaggaaaagcagtgagcccttcttttaagctggagaaagctttaaagatgcatctttggcaagtcttgccaaagaaatatgggttctaaatgtgataaaaccaaagacatcaagctggctctggaggccttgtttgaagtttgctgagtggattgtcagtgggaggctgatatttatatgtacaaacacacaagcattactgctaattgtggtaaatcaggctggccagcctggctctggggcccactgtgcctgccaccgcagcagtgtggaagccttgcatcccaggcacatgtcaggatcctcggaggccatcagccagccagcattgtgtgaattgcatttgggttcacagcactgtaattgtgtttctcctgctgtggtgagcaaaggaggaaaatggaaggaggaggtataatttgccctaggaaatagtcaggcaagtaggtggcacacaggggtgggatatggctaaaacactgaccttcccttgagagagaccatatggtgaagtggagagggcatggcgtttgtatcacacgaccttgtgttcaaatcctggctctgtcactggctgtgtgactttgggtcatttgcaaaacctctctgagcctcaactgccacttcttaaaatcagctctaagtaatcacagggttattcttcacaaacacagcatgcacatgcaaactttggcttagtaaataatggtttctccttctcttactttgttttctacataccccactccccttcctgtgaggagccttccacctttttctctgtgttctcttcctctcccattttcctggtagcattcaataaaacagaaatctgatttctgcaaagtaggccaccttacggtagaaatacatgattaggccccaccaaaaactttgattaggctattatcttctggatcctggatcccctccaaccaaaccaaacccaactagggctaaacacagcaatatatgaatacattgaatttctctctcactctttcttttttttaaaccagtttactcaggaatcacatgcacacatattttagcttccaaagccaatgatggaacaaattgtgtcccattaggctcactccattgtatgagttagcatcagaggagttcataccagagtgacttcatcttgaatagggcctaggtaagaagaggatgagacctgctgggctgcattcccaggaggttacacatttgtagtcacaggagagaaaggagttggtataggagttgatagatacaggtcataaagaccccagtgataaaacaggttgcaggccaggtttggtggctcattcctgtaatcatagtactttgggaggccaaggcaggaagattgcttgagcccaggatttcaagatgagcctggacaacatagtgagaccttgtctctacaaacaataattttaaaaacatgagctgggcatgatggtgcaggcctatagtcccagctactggtctgaggggcagttgggtggcaggctgagatgggaggatggaggctgcggtgagctgagatcaggccactgcactccagcctgggtgatggaataagaccctgtctcaaaaatagataaataaataaataaataagccagcaaaaccagaatgcagtgaagaagctggccaaaacccaccaaaacgaagatggtgatgaaagtgacctctggtcatccctactgcttattacacactaattataatgcattagcatgttaaaagacactcccaccagtgccatggcagtttacaaatgccatagcaatgaccagagatactctatatggtctaaaaaggggaggaaccctcagtcctgggaattacctgtccctttcagggaaaactcatgaatcttctaccgcttgttgagcgtataatcaagaaataactataggtatactcactcaagcagccatgcagttgctgtgcccatggagtagccactcttttattcttttactttcttaatatatttgctgtcattttactcttttggcttgctcttgaattccttcctgcatgaagccaagaacctttgtgacctcccaggctgaaccccaattttgagttccaccctatgacatcttttctggtgaccaatgaagggacaatggtaacctcccgttgactttaaattaaaactgattggcactgtttgggcttcaccggtgggtgagtctctccttgcccagattcaacttgctaacatttttttctcttcaattttggctcctttgtccttcctaatgttcttcattttggacagatgggaaagtggctgtgaggcctctggcttagcagcctgatagcagcctcctgttgtctgggtgccccagatgggagcacgcctggctggccacatcttttgcaacccaccttgtcatcccttctctgggaccttttctctttagtttcttttttaaaaaaaattttaaattatttatttatttatttatttttagagatagcatctcgctgtgttgcccaggctggagtgcagtggcataatcatggctcactgaagcctggacctcactggctcaagtgatccttccacctcagcctcctgagtagctgggactataggcatgcaccaccacgcctggctaaattttgtattttttttgtagagacggggttttgccatgctgcctagactggtcttgaactcctgggctcaaatgatctgcctgcctcagcttcccaaggtactgggattataggtgtgagccactgcacctggcctctctttagtttttaatgactggctgtttgacttctctgctcttcaggctgaaattcttatttcatgtttgtagtctttgccttggctatttggcaactgtttaaggcaagacacttggttttgagagttctcccgttgtgttgaccctgggacaccagggtcattgttctgtagctccaattatgttaggtctcatgcttttgggtttcactattggccaccccccagatgctctggggtttttggcatttggtgtggggacccttgttagctgatactctgggcttttcggcatttggatgctccagggtgtttggcactgacattcccctctagcattgtgggttagagtcccacccaggggaaatcttggttttgccttttcttgttttctactctaaagttatcattttctataaaaacattttcttttcttattgtcactttgtttaatgctttgctccaggaggtgggaatttgcaggggaaaataattgggctctccctatacttagaaaaacttctgtgtctagtagagatccttgttagacaaagggacagtggtgagtcccagagaactcgtcactagggtgccttttaggcaattggagcaaattcaaattagcaaactaagtttggccatttggataagtcccagttttgtcagggaaataatttgggtccagctatcttttataaaatagtgcgtttgcgttcctacattatggctagagctcaaagataaaagctattggatctttgtttatgtgtgtgtataaatgtctagatgtgtttatgtgtatgtacatttattatgttatatattgtatctacagggtaccaaattggcttataaataaaagagtgctcataaaaagagtaaataagtccaagcatttctcaagctcatgtaacttaagtttactaaaatttagagttactaaaaattcatatataactctgtataaatgtgccaaagaagatatgctcttagtgaaaataaattctttttggccaattcagatgtcatttatatgtggggtttaaaatatgaatttcgaaagaaaataaaaacaagtagaaagaaataaaaaacaataagcagtggagagagatgtgaggaaagttatgaatatgaagacgtatttttggtaaggaatgttataaagaaattttatgagaaaggatcttatatgataaattcttgtcctaaggtagaatgactgattgtttagaaaagaaggaaatataggacaagtcagaaagtccaagcatgttgtagatgacctatgtaagtcacgataaagtttatacaagagaatttattaaaatttagatgtaattagccataactgaaaggaaatttatttatttatttatttatttatttatttatttatttatgatttattttgagaaggagttttgctcttgttgcccaggctggagtgcaatgtcatgatcttggttcactgcagcctccgcatcctgggttcaggcatttctcctgtctcagcctcctgagtagctaggattacaggcatgcaccaccacacctggctaattttgtatttttagtagagatggggtttcatcatgtttgtcaggctggtctcaaactcctgacctcagttgatccacccaccttggcctcccaaggtgctgggattacaggcatgagccacctcatgcacccagccaggaaatttatatataatactctatctaaattttggtgccctatgttaaaacaagtttttcttcaagtattggtttgctttcagtaagattgcaagaaatattgacttttaattctagaatctgtttcctttgaaggcctctcagatttatatcttttccttttcccttgaaaaggtatagcctttgcaagttcaaaactgacttccctagactccttttaggaaaagcaatacagtggttgtttcaggctgtggctcaatagctaagcctttgttctttcatggtggtggcctgggttcagttcctggcttagagaatgagaggtttccagtttgctacttctgggacttttgtcatttatttattctttttgtctccatcgacagcttctgattttctcacttgaatttttttttctgtgagctaccttaagggtaatgttggatcttgtaaaaattgcttgccatctctttggagatacctcttgtgtccatggttaagttataaccttggttaaggcctgttggtttcactagggaaaatacctttaaaaaaaggcttaaaagccagagatgttggctatttgtcctggctagagtctggtattaagggatttaaaaggattttttaaaggacctctatagttataagtcagcttaattaaaaatggatattccatagtcatatttatatatatatacacacacatatatatgtatgtatgtgtgtatatatatatatttaaaagacctgtatgatttttttcttcttggaacttatttttttgagagaaagtgttttgtgtgtttgttgtttgtttttcttctcagtggactgaattatttctccattctgtctttttaccccctttaatgaccatattagaggacctaagataatttctgacagcctgggactccttgggaggaaacagaaggtgccacagacctcgttttgggagaaacctctgttttcctcatggaaccccaagagctgtaagcagagagttctccctcagaatccaaggctctgctctgtttacgtcacattacctgacctttgtgacttttgggggcatcagaaattactttgcattatgagggaacctttagcattggtgtgtattacctaggtaggatgtgtacttttagggattgcagttgcttacatgagtggttattactacagaccaatacttctttcttctcacatttaaatgaaaaaaaagcatgctcttgggcatccacctatgaatggaggatgggctgatttgctttaggttggccaccagcctttggggaacatcgttgcagtgaaatgcttggtgaaagcattgcactgtctgatcgcatagtgcacttctatgcacttctgcctgatgtcctaggctcaacacctgctacataattaagatcacttacttatcaggtttttaatcaaaatgaaatgttgctaagagttaacattatagcatatgtaattgagattactggagaaagttttacctacaagatatgtaaggaaagcaaaatgtgtttttggtaaaagattataggaaggtgtgccagtatagttttttattttgcttactttaatgggttaaaggattgttttaagtttgataggagaaagctgaagcatgagcaagttgtggaaggtatatgaaagattaacattttaaaagaaattctgtgtgtaaacattggctaaagttaaaggaggaggttggagccaagatggctgaataggaacagctccggtctacagctcccagcatcagcgatgcagaagatgggtgatttctgcatttccatctgaggtatcaggttcctatcactagggagtgccagacagtgggcgcaggacagtgggtgcagcgcaccgtgcgcgaaccgaagcagggcaagccattgcctcactcggaaagtgcaaggagtcagggagttccctttcctagtcaaagaaaggggtgacagacggcacctggaaaatcgggtcactcccaccccaatactgcgcttttccgacgggcttaaaaaaaggcacaccaggagattatatcccgcacatggctcagagggtcctacgcccacagagtctcgctgattgctagcacagcagcctgagatcaaactgcaaggcagcagcgaggctgggggaggggtgcccaccattgcccaggcttgcttaggtaaacaaagcggctgggaagctcgaacagggtggagcccaccacagctcaaggaggcctgcctgcctctgtaggctccatctctgggggtagggcacagacaaacaaaaagacagcagtaacctctgcagacttaaatgtccctgtctgacagctttgaagagagcagtgattctcccagcacacagctggagatctgagaacgggcagactgcctcctcaagtgggtccctgacccctgacccctgagcagcctaactgggaggcaccccctagtaggggcagactgacacctcacacagccgggtactcctctgagacaaaacttccagaggaatgatcagacagcagcatttgcggttcacgaaaatctgctgttctgccgccactgctgctggtacccaggcaaacagggtctggagtggacctttagcaaactccaacagacctgcagctgaggatcctgtctgttagaaggaaaactaacaaacagaaaggacatccacaccaaaaacccatctgtacatcaccatcatcaaagaccgaaagtagataaaaccacaaagatggggaaaaaacagagcagaaaaactggaaactctgaaaagcagagcgcctctcctcctccagaggaacgcagctcctcaccagcaatggaacaaagctggacggagaatgactttgacgagttgagagaagaaggcttcagacgatcaaactactccgagctacaggaggaaattcaaaccaaaggcaaagaagttgaaaactttgaaaaaactttagacgaatctataactagaataaccaatacagagaagtgcttaaaggagcagatggagctgaaagccaaggctcaagaactacatgaagaatgcagaagccttaggagctgatgcgatcaactggaagaaagggtatcagtgatggaagatgaaatgaatgaaatgaaatgagaagggaagtttaaagaaaaaagaataaaaagaaacgaacaaagcctccaagaaatatgggactatgtgaaaagaccaaatctacgtctgattggtgtacctgaaagtgacggggagaatggaaccaagttggaaaacactctgcaggatattatccaggagaacctccccaatctagcaaggcaggccaacattcagattcaggaaatacagagaacgccacaaagatactcctcgagaagagcaactccaagacacataattgtcagattcaccaaagttgaaggaaaaaatgttaagggcagccagagagtaaggtcaggttacccacaaagggaagcccatcagactaacagtggatctctcagcagaaactctacaagccagaagagagtgggggccaatattcaacattcttaaagaaaagaattttcaacccagaatttcatatccagccaaactaagcttcataagtgaaggagaaataaaatactttacagacaagcaaatgctgagagattctgtcaccaccaggcctgccctaaaagagctcctgaaggaagcactaaacatggaaaggaacaaccggtaccagccactgcaaaatcatgccaaattgtaaagaccattgaggctaggaagaaactgcatcaactaacgagcaaaataaccagctaacatcataatgacaggatcaaattcacacataacaatattaactttaaatgtaaatggactaaatgcttcaatcaaaagacacagactggcaaattggataaagagtcaagacccatcagtgtgctgtattcaggaaacccatctcacgtgcagagacacacataggctcaaaataaaaggatggaggaagatctaccaagcaaatggaaaacaaaaaaaggcaggggttgcaatcctagtctctgataaaacagactttaaaccaacaaagatcaaaagagacaaagaaggccattacataatggtaaagggatcaattcaacaggaagagctaactatcctaaatatatatgcacccaacaatacaggagcacccagattcataaagcaagtcctgagtgacctacaaagagacttagactcccacacaataataattggagactttaacaccccactgtcaatattagacagatcaacgagacaaaaagttaacaaagatagccaggaattgaactcagctctgcaccaagcggacctaatagacatctacagaactctccaccccaaatcaacagaatatacatgtttttcagcaccacaccacacctatcccaaaattgaccacatagttggaagtaaagcactcctcagcaaatgtaaaagaacagaaattataacaaactgtctctcagaccacagtgcaatcaaaccagaactcaggattaagaaactcactgaaaactgctcaactacatggaaactgaacaacctgctcctgaatgactactgggtacataacgaaatgaaggcagaaataaagatgttctttgaaccgacgagaacaaagacacaacataccagaatctctgggacacattcaaagcagtgtgtagagggaaatttatagcactaaatgcccacaagagaaagcaggaaagatccaaaattgtcaccctaacatcacaattaaaagaactagaaaagcaagagcaaacacattcaaaagctagcagaaggcaagaaataactaaaatcagagcagaactgaaggaaatagagacacaaaaaacccttcaaaaaattaatgaatccaggagctggttttttgaaaggatcaacaaaattgatagactgctagcaagactaataaagaagaaaagagagaagaatcaaatagacgcaaaaaaaaaaatgataaaggggatatcaccaccgatcccacagaaatgcaaactaccatcagagaataccacaaacacctctatgcaaataaactagaaaatctagaagaagtggataaattcctcgacacatacaccctcccaagactaaaccaggaagaagttgattctctgaatagaccaataacaggctctgaaattgtggcaataatcagtagcttaccaaccaaaaagagtccaggaccagatggattcacagccgaattctaccagaggtacaaggaggaactggtaccattccttctgaaactattccaatcaatagaaaaagagggaatcctccctaactcattttatgagggcagcatcatcctgataccaaagccaggcagagacacaaccaaaaaagagaattttagaccaatatccttggtgaacattgatgcaaaaatcctcaataaaatactggcaaacagaatccagcagcacatcaaaaagcttatccaccatgatcaagttggcttcatgcctgggatgcaaggctggttcaatatacccaaatcaataaatgtaatccagcatgtaaacagaaccaaagacaaaaaccacatgattatctcaatagatgcagaaaaggcctttgacaaaattcaacaacccttcatgctaaaaactctcaataaattaggtatgtaaatgggacgtatctcaaaataataagagctatctatgacaaacccacagccaatatcatactgaatgggcaaaaactggaagcattccctttgaaaactggcacaagacagggatgcgctctctcaccactcctattcaacatagtgttggacgttctggccagggcaattaggcaggagaaggaaataaagagtattcagttaggaaaagaggaagtcaaattgtccctgtttgcggatgacatgattgtatatctagaaaaccccattgtctcagcccaaaatctcctgaagctgataagcaacttcagcaaagtctcaggatacaaaatcaatgtacaaaaatcacaagcattcttatacaccaataacagacaaacagccaaatcgtgagtgaactcccattcacaattgcttcaaagagaataaaatacctaggaatccaacttacaagggacgtgaaggacctcttcaagaactacaaaccactgctcaatgaaataaaagaggatacaaacaaatggaagaccattccatgctcatgtgtaggaagaatcaatatcatgaaaatggccatactgcctaaagtaatttatagattcaatgccatccccatcaagctaccaatgactttcttcacagaattggaaaaaactactttaaagttcatgtggaaccaaaaaagagcccgcatcgccaagtcagtcctaagccaaaagaacaaagctggaggcatcacgctacctgacttcaaactatactacaaagctacagtaaccaaaacagcatggtactggtaccaaaacagagatatagatcaatggaacagaacagaaccctcagaaataacgccgcatatctacaactatctgatctttgacaaacctgagaaaaacaagcaatggggaaaggattctttatttaataaatggtgctgggaaaactggctagccatatgtagaaagctgaaactggatcccttccttacaccttatacaaaaattaattcaagatggattaaagacttaaacgttagacctaaaaccataaaaaccctagaagaaaacctaggcattaccattcaggacatagggcatgggcaaggacttcatgtctaaaacaccaaaagcaatggcaacaaaagccaaaattgacaaatgggatctaattaaactaaagagcttctgcacagtgaaagaaactaccatcagagtgaataggcaacctacaaaatgggagaaaatttttgcaacctactcatctgacaaagggctaatatccagactctacaatgaactttaacaaatttacaggaaaaaaacaaacaaccccatcaaaaagtgggcaaaggacatgaacagacacttctcaaaagaagacatttaagcagccaaaaaaacacatgaaaaaatgctcaccatcactggccatcagagaaatgcaaatcaaaaccacaatgagatagcatctcacaccagttagaatggcaatcattaaaaagtcaggaaacaacaggtgctggagaggatgtggagaaataggaacacttttacactgttggtgtaaaagtgttggtgggactgtaaactagttcaacccttgtgggactgtaaactatttggttggtgggactgtaaactagttcaacccttgtggaagtcagtgtggtgattcctcagggatctagaactagaaataccatttgacccagcaatcccattactgggtatatacccgaaggattataaatcatgctgctataaagacacatgcacacgtatgtttattgcggcactattcacaatagcaaagacttggaaccaacccaaatatccaacgatgatagactggattaagaaaatgtggcacatatacaccatggaatagtatgcagccataaaaaatgatgagttcaggtcctttgtagggacatggatgaaattggaaatcatcattctcagtaaactatcgcaagaagaaaaaaccaaatgccgcatattctcactcataggtgggaattgaacaatgagaacaacacggacacaggaaggggaacatcacactctggggactgttgtggggtgggggtagtggggagggatacctttaggagatatacctcgtgctaaatgacgagttaatgggtgcagcacaccagcatggcacatgtatacatatgtaactaacctgcacattgtgcgcatgtaccctaaaacttaaagtataataataataaaataaaaaaatttttaaaaaataaagttaaagggatattattattattatttttgtaagttaaacattaggattaaaaagcacaacagagttttctagagcactgatctactctgtaacagaaaattgtaaagggtttaaaaggtttatgagaatcttaccttatggtcaaactggttaagattgggaagatttgtctataaagttttattaagaattgggtttgacattaatactacactaatgcaaacgtgaaatgtggctttctctcttgaataagattttcatgtattattacaagataatgaaagatttttatttgctttttaaataaactataggaaaaataagggagagaaaagtgacagatcatttggaaacccaagtctcccctatatcaatgagtaaaagtttttacctttttgaaatctttgagttatcattttggctaaataaatgctttatggtgacctgggattctattttgtaatatcaactgtttaaaccttttgtatttgacaaacgttccaaactgaaattctaatgtaagtctttttctgacctgattagtccttctagatattaggtcccctaaagtccaaaagtgacatatttggcttattagatatattaaaatcatacaggaagcactttcaaatataaaatgctatttggctttctttggactatacttatataaatgtgttattggtatatgttccaaaattatgcaaaactcctataattctgatatgacttagtgtacattatcagtcataattatagttcttatgttacattattgtgtgctacagagttaaccaaatttctttgtcaattgcatctttaatcagctgtcctaagacttttgtcacccacagacaattgtcttgttttaatccttttcaaaaggtggtttataatcagctataggactctgatgggtactctaaaatgcaagcctctgataactttgaaaattgtgccattggctgggcatgatggctcacaactgtaatcccagcactttgggaggctgaggcaggcagatcacgtggggtcaggagttcaagactagcttggccagcatggtgaaatgccatctctactaaaaatacaaaaatcagtcaggcatggtggcatgcacctgtaatcccagttactcgggaggctgaggcaggagaatcacttgaacctgggaggcagaggttgcagtgagctgagatcgcaccattgcattccagcctgggcaacaagagggaaactccgtctcaaaaaaaaaaaaaaaaaaaaattgaaaaagaatattgtgccattgaaacagaaaagaaaacacaaataaacttccaggattctcatagaaacttaatatattcataaggaatgtggcccaatatcaggcaaaacaagagttaacagcatggactaaactaataaaagaccaaaacaatcttttaatgactttttgcttaaaacattgcatatcctttctgttttgcttttcagagtcaagaaaacttttcctttggaaagtatttactgcttttaacaattgaaaaaagtatactactatggacaaaatttggagcatatgtctttctttttacctgatttctccagaatttgaaaactatttgggagtattcttaactaatagcaatatagttatttgcctaagtgcagtaagaatcttttcttttgtaataggacacaattaaagaaactgcttattttatgaaggctttgactagaatggtgtgctttcagatacaaacagactgctttaagggatcaaagttgacttatagagccaataaaagccactatggaaaactggccttattctttgtctatgcagtctctgtatggggttcctgacctgtggtaagtgaagaatgtcactttctgacaggcccaggagccccaagttatcttgggacatcaagaagaaaggaatgcacccaacttatacaggtatttgcaggcacagataaatctgtggctggctcaaggctttaagaagcctaatgtgagattctttttaaattaaatttccatcgaaaccaattttaacaagagcctatgtggcaaataattatttttgctgcactttatacaaataatcaggccaaatttcataagattaaaactttatggcaaacaaatttgtcccactatgatttgtctttggtaaaaatggaagctagagagagaatttgtttcaaaaactatgatacaccagttattagattctagtctcgtctgttgtttttgagtttcttctgcaatttaggcagaccctgcttattcctgagaatcaaccagtgatctatggctgttgctcagaagaaataagagggatggctaacgtaaagatctggattagtattctaattctaggcatgtattagaattggctagtgaccccatatcagcttggttttaacaattacccagttcatggaaagccttcttatttagtttacttgggataattgtgctgattttgttttactgttgtggaatatattgctgttgtcctctttgtgtaggaatgcaggaaaagcttacttaacattttcttaaattgaacacttattaatcttccagatttcaccttttgtcagaactcagagttatgatttgtcctcactgtactgacaacaggctctggtagggtgcagaggtcctggtaaacacaccctctgctggaaaacagggagaagtttccatcagtgtaagcctgcacttgggttgtctgggctgaagttaggagactgagtagaacatttgctgcagaaaaaaaagaagatgtgtaattttcacagttagaattaacttaggagagctgaaattaactgagcctcggaaatctgaatcttgaagtcaccagtggcttttgggactgtgagagagtctcttgtggtctttaatcatgtgagggtggggtgaaattcaatattcagtggttctgcaatgggatgcactgtgcaattggtgattgagaagccaactctctggctttaggagaagaatgtcttgctgttagtccttctggaaatagagccttgcattgcctactgtccgtttacactacctttgcacattgcctttggttatagagtcatgtccaatggctctttacttctgtttgcagggcaggagatggcaccctgttaaagagaaaggatagtagctgcaaagtcatttgtttctctgtttctgtgactgtatatattggctcatctttgaatggtctttatagccacaccaggctggaggtaacagggtcatgggagtggactgctggtgtgggctaaatcagagttcagatccatgtctccaagaggtaggaagtgcagggcaagttatgtggcttctggggcatccctcactttcttagttaaagagaagttgaagtaatcattctgaaatattatgggagtctgcagaaaaagtaatgaaaaccaaagcactttccattaatctccataatttagtccttacgataatgtcacagggcaagcaaccaatcagaccttactagtcgtgcttcctagaagagactgaggttcagagatttggacagagtgtcagatatgggatcagtggctagtccaatgtgatttccatcctttcttctgagagaaagcataagaaggctaagaggatgggggtaaagcacaagtcacctgcctgagagtcaacagagcaggggtctctttctcagtttgtttctctaagttatggcaaaagctttttgagctgtgattattgagaatgggggctgaagttcaacacatagttggcatgagagaagtaattatgattgaagaaatctagatgaaatccattgttcttttctgtaaaggggttgttatccctgattctttttttcttttttcttttttagatggagccttgctctgttgcccaggctggagtgcagtggtgtgatcttggctcactgcaacctctgcctcctgggttcaagtgattctcatgcctcagcctttccagtagctggaactacaggagtgtgccaccatgcccggctaatgtttttatttttagtagaggtggagtttcaccatgttggccaggctggtcttgaactcctgacctcaagtgattcacccaccttggcctcccaaagtgctggaattacaggagtgagccattgtgcctggcctgttctcactgattcttatagtgccatgtttctcagaatttgtggcttcaattacttatatttgtgcacctgacttttaggtgagctccagaatagcattactaattaagaatgagcatttagagtagaaaaagtgacaggaacagcaagactcacttccagaaagcctcactacaggtctaataggtgaggaaagtccccatctttcccatttttcttcattacctccctgtggggcaagcactgccattatgcatgagtaaactgtctgagttatagataagtaatgacatgaaacttcacaaacaggcctagatttctacccagggaaccgctgttatcagagaagggagtttggaatcttaagcaacaaacacatgttgattctcagtatttgcctcctgatggcttgctcagagagcctgttttcattgcccactttatatgtcagtaaataatcttccctggcagtgggtccaccatgtctggatgcacacagggaaatctggtggggtctggccagtgaaaaacactcctcaggttttgcaggaaaagcagtgaacccttcttttaagctcgagaatgctttaaagatgcatcattggcaagccttgccaaagaaatacgggatctaaatgtgataaaagccacgacgacatcaagctggctctggaggtctcctttgaagtttgctgagtggattgtcagtgggaggctgatatttacatgtagaagcacacaagtgttactgctaattgtggtaaatcaggctggccagcctggctctggatcccactgtgcctaacaccagccctgcatcccaggcacatgccgggctcctcagaagcgatcagccagccagcattgtgtgaattgcatttgggttcacagcactgtaattgtccttctcctgctatgaggagcagagagggaaaagggaagggagggttgtgtaatttgccctaggaaattgtgggggagggacaggcactgggccgggtggggggcggtgcgacatggctaaaacactgaccttcccttgagagagaccatatggtgaagtggagagggcacagcttttgcatcacacaggccttgtattagaattttggctctgacaccagctgtgtgaccttgggtcatttgcgaaacctctctgagcctcaactgccccttcttaaaatcagctctaagtaaccacagggttattcttcagaaacacagcatgcacatgcaaactttggcttagtaaataatgatttctttttgttctatctactccacctccctttcccattagaagcttgctacctttcactctgtgttttcttcctctcccattttcctggtggcattcaataaagcagaattctgatttctgcaatgtaggccaccttagagcaaaatacatgatcaggcaccaccaaattaggctattatctactggatcctgtttaaccaacccaaacccaactcaggctaaatacaggaatacaagaaaacgctgaatttctcccctttctttttttttttttttttgagacagagtcttgctctgtcacccaggctggagtgcagtggcgcgatcttggctcactgcaagctccacctcctgggttcacgccattctcctgcctcagcctcctgagtagcggggactacaggtgcctgccaccacgcccggctaattttttgtatttttagtagagacagggtttcaccgtgttagccaggatggtctccatctcctgatctcatgatctgcccgcctcagcctcccaaagtgctgggattacaggcgtgagccactgcgcccttccctccttttttttttaaaacaacaacaacaacaacaacaaacagtttattcagtaattatgtatacgtattttagcttccaaagtcagtgatggaacaaattgagtcctattaggcccactccattgcatgagttagcatcagaggaggtcaaactagagtgacttcatcttgaatatgggctaggtaagaagaggatgaggcctgctgggctgcattcccaggaggttaggcatttgtagtcacaggatgagataggagttgggtaggaatggtttcataaagaccacaggatgcaagctgggtgtggtgccttatgcctgtaatcccagtactttgggaggccaacgcaggaggattgcttaatcctaggagttcaagaccagcttgggcaacatagtgagacctcatctctacagataatttttattttattttattttatttttttgtgatggagtcttgctctgccgcccaggctggcgtgcagtggcatgaccttggctcactgcaacttctacctcaggggttcaagcgattctcctgtctcagcctcctgagtagctggaattagaggcgcacaccaccacgcctggctaatttttttgtgtttttagtagagatggggtttcaccatgttggccaggctggtctcgaactcctgacctcaggtgatccacctgccttggcctcccaaagtgctgcgattacaggcatgaaccaccgtgcccagcctctacaaataattttttttttttttgaaatggaatctcagtctgtcgcccacactggagtgcaatggtgcgatctcagctcactgcagcctctgcctccctggttcaagcgatttgccttacaaatgatttttaaaaaatgagctgggtgtggtggtttcacaagatacgggtgataaagaccccaggatgcgggccgggtgtggtggtttatgcctgtaatcccagcactttgggaggccaaggcaggaggattgcttaagcctaggagttcaagactagcctggacaacatagtgagacctcatctctacaaataattttttaaaaatgagctgagtgtggtggtgcaggcctgtagtcccagctcttgggctaggcatgggggtcagctcaggtgggaggattgcttgagcccaggagttcaaggatacagtgaactatgattgtgccagtacactccagcctgggcaacagtgcaagaccctgtttcataaacaaattaaaaaaccccaaaaacctaggatgcaatgaagaaggaagccgaaacccaccaaaaccaagacggtgatgaaagtgacctctggtcatcctcactacccattatatgctaattataatgcattagcatgctaaaagataccaccagcaccatgacagtttacaaatgttgtattaatgacaggaagttaccctatatggtggaaaaaggaaggaaccttcagttctgggaatttcctccctgtttctgggaaaatcatgaataatgcacccttagtttagcatataatcaagaaataaccataagtatactcagttaagcagcgtggctgttctgcctatggagtagccacccttttttattcctttattttcttaataaatttgcttgaattccttcctgggtaaagccaagaacccatgtggcctcccatggtgatctccaattttgggattcaccatgtgacattaggagcaacttagggatctggtgcatcccaggccaagactaacatggtgatttttggggggttatgttaaaactgggggctctgcccaggcccctcagtgtggcttcttgagtcaatacctgggtacttactggccctagcacctacaagttcattcacagttccttctcactgacttcaccagtgaccactatcagtgacttcaagggagaaatgaggggggagataaaataaagtgaatggggaagagataaagaagagaggtcttttcacagtttgccagaatagtcccttcagtggttttaccccagggcaacaggagcccccttttagtttctttctcttttaattttcttttcccttcccactttttgcccactttttgccttatttgtgtctgactcaatttccgtctctttctctacttcttcattcccagatttggctgtagaaaattagaaagttcttgaacttggtttgcacgggtgcttttactttaacatgaaaatgaatgatcagcctccttctaatttcatcctagagtctactgcatccctcctaccccctgcacaggaatttagtcacacttatctctcccactttctctcccttcttcactttctctattgctcctcctttcatgcttgtacctgcttttccatgccctgtttagcctggcttgggatccagcaggttctccaagggttcctgcaagaaccccggctgggtgcccaggtctgagcctggtatgtgcctcagtatcacaaaggcctcctgtaaatgacacacattgttggaagtttcagaaattctaggtcaaaatggcactgaaatattaaggtatttaccccaacccaagcaacttttctaaaagttgtagagagtgtgacctctttattaattgaaacgtgaaaatcagctctagtttggaagctgagaaaaaatatatatatatgtatttatttctttgttgtttgaattcttaatataaatggtttaaaggaccattgaaaactgcatgcaatcacagaaggttttggcttcaggcagctcccgccatgatcttggggccccattgattctttcatctttcaggcgtcttactgtttgaaccttgaattttaacctgggacatgtttgactaaaatgatgctgttaatattttctgttgtgcaaaacacaaagagaactaggctccagggttgtttctatttgctaatgctgtttctgttgacttttgacttttctagtttcccagagctatggggacttcccatccggcgttcctggtcttaggctgtcttctcacaggtacggagcccagtcctctctgagttccttgtttgggtgtcttgtttttttaagctttgtgctgcatgggtttattaccagtactctgcatacacagtccaaaagagtgaaaagaaatagaaaactataggacgttatccagaatgaccacaaaccttcagttccctttgctgtattgcacttactccatttcaaaaggaatgctctccagtggcagttttagtacatatataatgttggcattgaaatgttgttagtaataatgtctaaatttacttactactctcttccttttcctaggacaaggcttctattagagctggattagataaattcaggaatggtcagctgtgggaggtggcacatctgttgtcccagccccttgagcagctgaggtgggatgatcccttaaggccaggagttcaaggttgcagtgcactgtgattatgcctgtgactagccaccacactccagcaacatagcaagacctcatttaaaaaaaatgttcaaaggaaataaataatagaaaattcttgcccaagaaatcatacttgtcttaaatcataactctcttgaggaaagatgcttacattgcttctaaatctcagagtcacctttatcttctctaggaatcaaattgatagatgaatgtttggctcttggaaaatcttaaaaactttcccaccaaaaggatcattggggtaatttgttgaagtgtgtattggactgtcttagttttcctccagatatttatgcactgcagatgttcgccatgaaaccagtgctcttctattctgaggagttagctcagcccgttagtgtctttgtcttacccatttggatatggtagaattgagcaagaccagagattcaacagttctaagctccactaagtataccccatctacagagtaataggtgatccagatgtacttacaaatcctatcttaacaagctttaggaattatagtggtcatatattgaagttgggtgggagtctcacaccaggttccaagggagattacaaatcactaattaataattaagtcataatatctcttctatcagtctcgggtttcttgttttctaagttctgtgctccatgggtttattatctgtactctgcttacacagtccaaaagagtgaaaagaaatagaaaactacaggacgttatccagaatgaccacaaaccttcagttcctttgctgcattgcacttactctattgcaaaaggagtaagtgcaatttcagtctaaataagcgagactgaaatttgagcttcgaagatgaacttagagttttcactcttgggttttacttaccaattgtgaattaaaatccgtatcatctggcaccactgcactccagcctgggtgacagagcaagactccatctcataaaaataaagaaataaataaacaaataaatccacatcatcctgctttggccctggaagtcatgagggagagacggcatgcccgagggctataagaaatggaagatgtggaattcttgagcacagatgtgctttgtgttttcttcagtctgtgtccttgcctccattcttattccatgtgggtttttttttttttttttttttttttttttgagacagggtctctcgctctattgcccaggttggagtgcagaggctgactgcaacctcaatcccctgggctccagtgatcctcccacctcagcctccagagtagctaggactacaggtgtacaccagcacacctggctaatttttttatttttttattttttgtggagaccaggtctcactacgttgcccaggctggtctcgaactcctgagctcaagcgatcctcccacttccacctcacaaagtgctgggattatagacatgagcctctgcgccccagcctcatctcattttaactaaaggaaacctttgcagtgattgtgaaccataaagaacccatatgtgcttgagcccgtgccatcttgggatattttatggttacacataagagtctgaaatatggaattggaatcagacatcctctgtctatttgagtgtttggaggggtgaatctagtggggcttggtggagctatttggaacatttgctgctctcagcagatgcagtggctgttataatgggggagctttcatgggcatccaggctaacggatttttgtgtagaaatggtcattgttcatctaagctgctactgttgcttctctcagttgtcgggatgagactgtcctttctgactgcatcctattcagagcgtgcttccttttgcagggctgagcctaatcctctgccagctttcattaccctctatccttccaaatgaaaatgaaaaggttgtgcagctgaattcatccttttctctgagatgctttggggagagtgaagtgagctggcagtaccccatgtctgaagaagagagctccgatgtggaaatcagaaatgaagaaaacaacagcggcctttttgtgacggtcttggaagtgagcagtgcctcggcggcccacacagggttgtacacttgctattacaaccacactcagacagaagagaatgagcttgaaggcaggcacatttacatctatgtgccaggtgagttggctgggtctccaggaccaagcttcttctcttcctgtctctcctgttaaatgtactaaggttttaaacatatatataaataattaatatttattgcgggaagtttgaaaaatgtaagcgaacacacacaaaaatcatttgtaatattatcaagaaatattcattgttagcatttcagagctgtattaagtttggaaagtcatctttgttatgacatgtcctgtattgatactgtataaacaatctgaaatatactcatctctattcagttcattcaagttgcacacatactcacagtgtgtccagcactgggctaagtgttgagtacacaaaaattaataggtaagccctgtcttggagttgctgatagttcattataatatcttccaaataaacactcgatttttcagattcactatcaacatacatttattcttggagagttggaaggaattttctttttccttttaaaaaagttacatatatatatatatatatatatatatatatatattttttttttttttggtaacagggtctcactctgttgcccaggctggaatgcagtggcatgatcatcatagcttactgcaatctcaactcccttggttcaagcgattctcccacttcagcctccccagtagctgggattacaggcatgcaccaccacgcccagctaatttttatattagttgagacgggggtttcaccatattgaccaggctggtcttgaactcctgaccttaagtgatctgcctgcttcggcctcccaaaatgctgggattacaggcgtgagccactgtgccctaatttttatttttatttttgtagagatagggtttcactgtgttgcccaggctggtctcaaactcctgggctcaagtgatccacagccacctcagcctcccaaagttctgggattacaggcacgagccactgggcctggcctactcctgcattttaattaaaaggacaaaagggtcgagcacaagtgatggcaatttcagtatgcagttgggtaaattaaaaaggactatggctagaatccttggttttagaacaaaacctaaactgtttatgattcttgccatccttgctgttttggcataggtgtgtcttcctacctttctgccttttctttttcagtttttaatgggctcctcttcctaccctctataactacgagtgtccccagggatctagaccctctttactttttcatgatactcttattcatatgaaccttccttcttaacaattaaaaaaaaccaaaaactttgttttgaaaagggaaggtatttagaatgtcactccaacttcattcacacttagattccttcaggaaaatcctctaggtgtggagggattttcccctgctgtgaagagaatggtaggaacgtgaatgtgttaaaggcacacgagtccctgaagttttaatccgtgtaagattgtccaaaaattcttcttgttccagcacagatgccatccaagtagcccctgcatcgctgtctgactgagatctttttattcgcaatcatgcagacgtaggggccctttctgcagctgatgtttgagactgttagaacttcttaccaccgtagcttaagtagctgtttttcttttggaaaggaaattctcaggctccttctccttctttaaattttatgtatttctcaaaggattactttttaataaacagatttctatgctatttttgaatcatactgactataggtggtaagagtttttaaaagcatttcataataaaactcgaaatattttttcctgttttaaacagagttggactgtattattttattgttaatttttgtttttagttgtttaaattttgatttagattcctggttagtatttatttatttatttgtagagacagggtctctctatgttgcccaggctggtctcaaactcctgaacacaagcaaccctcccaccttggcttcccaaagtgctgggattacaggcatgagccacaactcctgtccagtattgatatttatcatcagtattatccatcaggagacaggcaatttggtattattcatacttaaaaatcactttgtagctgtcatgataactaatgccagtggggcaattcttctggatatatgtgtaaaggtgaacttcatacctaatatcaataatgccagtgggatagtttttctggatttatgtgtaaaggtgaaattaatgtctaatagagtcttcattcttttttaaaccacagacccagatgtagcctttgtacctctaggaatgacggattatttagtcatcgtggaggatgatgattctgccattataccttgtcgcacaactgatcccgagactcctgtaaccttacacaacagtgagggggtggtacctgcctcctacgacagcagacagggctttaatgggaccttcactgtagggccctatatctgtgaggccaccgtcaaaggaaagaagttccagaccatcccatttaatgtttatgctttaaaaggtacttgtatcatctccttccttctttaaataagagtaacaggcaaaatcataaggtgcgtgtaggatttttttttttttttaaatcatcatcactggtgatcctaaattctgatttggggatttaggaccccagctaatacaatgtctgtggctataataataagcttaaaattactaaaggccaaagcttgattacccatgcaagatttcatgtttcatcagttgacttcaaaatactgtaaggaattc

SEQ ID NO: 99 - DNA, 134174 bp, Homo sapiens
cttaaggacagtgcctggcatatagaaacagcactcaataatgttagctattttatttatttatttatttatttatttatttatttatttattttctttttttttgagacagagtctcactctgtcacccaggctggagtgcagtggcgcaatcttggctcactgcaaacttctgcctcccaggttgaagcaattctcctgccttagcctcccgagtaggtgggattacaggcatgcaccaccatgttcagctaatttttgtatttttagtagagacagggtttcaccatgttgcccagactggtctcgaactcctggcctcaagtgatctacctgcctcagcctcccaaagtgctgggatgacaggtgtgagccactgcatctggcaagtgttagctattaatatgtcaattgcgtgtatgcatggacaagcatgcattcccaaggatggtgtctttacattttaagcttttatcagattttcaaaagccatctgtgacccctaaaatagattggaaccatttgggtttatgtatcttggaggcacagtttccttaaagatactcattttgttgtctacttgaaccattcttcccatcccttccacttctcagcagatgacatagctccctgtggggatatatctgctccctgtaggtacaattccaaatcacctcactgcactggatgtgagacagcttatggcagctgctgcttccacctagagaaagacatgggcctgcatccatgctgtgtgtgattcatgtactcatgtggccgtgatagctgtaatcggctcatagatcattggatctgttcttagttttgttcccaggaatatctaaaaataggaaactggtccattcagggcttacaccttttgggtgaaaattcaggattaatgtttttggatattattcctttggaggacataaaaggcaatattgaccattcatcattcatctagtatttattgagcacctactatgtgccagggactgagagttcagtaatgaacaaaacacatgtaaaagacactcaaatgggacaagataattagcacaagttattaagagcccaaggggaacccttttctatttccactgctgtggatcatcagtgagtagacatgggtttaactgtctccctccttccttgcagacctttctgcccgtgaagtggatggctcctgagagcatctttgacaacctctacaccacactgagtgatgtctggtcttatggcattctgctctgggagatcttttcccttggtatgggcctgacattgctgcttatttgggctgttctgaaacaccactggaaggaaaatgtgttctttcaagccccaggatgtagacagtgttaagataacctggtgtgaggccagtatgctgcagccacctcaaaccacatgttgtgccttattgtgtctgagataggcccatgcaggtggagatgggggtttttgttgggggttgcgtcttactcctggcctctgcccctcctctcctttgggctatgccagagtgacttcctcccactggaagtggtcccaatgacattcgcatcccagctgctttttcattttgggctttgggtcacatgggttcacccatggagagtgggccctccctcacctggtggcgattgatgctcaggtgaaaaggggtacgtggcgggaagggcagggctctcattcctggttgtcattggccagtcttgacaacccaggtgctgaacaacccaggtgccctgggctatccggtgaggtccctaagagaaggatgagccataaccctgacatctggatggttcatctggggagatgagacttacacacttagggataaacagtgtgctgctgatttaaaattgtaatttgagtcttgagtaaagagaaaggagtcctggaatagtgtgggaaggcttcagagagggaacttaacttgacctggccttggctttgaaagtgtgaaatgtttcatgaatttatctgtgatcaggatgtaatagtaaagtgtgtcttcctgccccgtctcctttttcatcctagttctccctccatggatgatcacaatggatcatcccccagtggcttaatggagtcctgtactcccttaaaagcagagaggccacaactttgatttttgctttagctatttgaacatacctggtgaaaaagactctctgggttttaatgattcagaatttctccttgcttttctagttcattttgtctgtgttgatccagtagtcatacacattgaaaaacacttgaacgcttatttctaaagatgtagaatttttgtgatggtacttggacttgaccaacctggagtcctaattaaacttaaggtttgagctggtctctgaagtcaaggagatgatgacactgaattttcttgaaaaaaccagtgcttcaaggctataggatctgaaaggttttctaacagtgttctatcatgccaagtgtttcagcaatgcactgagcgtttgttagtcctggtgttttattgtttggcttttaggtggcaccccttaccccggcatgatggtggattctactttctacaataagatcaagagtgggtaccggatggccaagcctgaccacgctaccagtgaagtgtgagctccttccccatcccgggggcctgtgttcacagtctgtgggtctagggggagggaggggccctgagacttccccctgtgcccactcttgagttctgtccccacagctacgagatcatggtgaaatgctggaacagtgagccggagaagagaccctccttttaccacctgagtgagattgtggagaatctgctgcctggacaatataaaaaggtgtgtttggatctgtgggtggaaaggtctggataaagctggaagttataccagtgagctgtgctgttccgcagttctagaggagcattttcaaaagaggcaaaagactgtgtgatccagtggctgggcttcatggcggtgctccacgagaccctagtagcaatgatgaatgaaaaccctccccttcccgtggggctttcctttcatcttatatgtacagtacctgtaagcactattctccagatgtttgagtatcagaagttagtgtgcagttagaagactcagggcatccatggccattacatcactaatttgagtgcacttaaatccatgcgaaattggcttttaccagcggactggaaggaacaacctcagctgttatctgtggcaccagctggttttttgtggaatgggaagcattgttcaaaggaacaaatgtaatttcttggaaccaggcaggatatgtaaatgaatgaaacaactttctgctgaggtgttgagaggaaaactcagacataacctcagtttcttagattgagattagtccctgtgtagactttttatacttatcatttttcttccttcttctcaaggaggaatagtgttaggagattgtgtgccgaactggaagttaaatgcttctgtctgttaattatctcactgcccactacaactttcacaggtgaggcagtgaggaggcagaaggaaattaaccctcagttggtcaaagatgctctgactggtggaaatgtgttggtgggaagagattgaagttattgttgaaaatagggtcttttcacatccaatgttagacctctccaatgtttaaggatcatgaaggctttgggtattatccacccaatagaaggcctcactgcctctctatgggacccatccaagccctggaaaggcaacgtgatggggaccagaaggattctcagttgtagctactgacttggagaaggggctactggtatcttagcacctaatggcagaagctctttaccattggtggccccttcttcatgttctatgtctctggggatagttgacatgactctccttcaactaagtcccacatcttccaggtagtttggagatatgtacagttaaataatagtaagttctgagtgtctctattcatttttgaggtttggttgttaacacttgattaaatatgttcaatgaatgtttatagagttatgaaaaaattcacctggacttcctgaagagtgaccatcctgctgtggcacgcatgcgtgtggactcagacaatgcatacattggtgtcacctacaaaaacgaggaagacaagctgaaggactgggagggtggtctggatgagcagagactgagcgctgacagtggctacatcattcctctgcctgacattgaccctgtccctgaggaggaggacctgggcaagaggaacagacacaggtagctgtgggggcagcctcggtgtctcacctttcccctcccctataggccctgaaggagaggacccattttcccgataatggtgcactcccggttggtaaatatgtactcagggacaagttgcagaatcctcaggaggtccacgtggttttgaaaatgcttcccagatgattctaatatgttccccctggggctgggagagggatgtgcatgttgtggggagagggacatgcttccctggtggagaatctttgagctaaattctcaggtaatttgatcaaattgatacagaactgtgattactgagatcatataagcctctcctgccattgtcttaaatagtcattgaactggggaaaaagtgaagagaggcgggactgggtcctttgacgctataccctacctgtgaattggaatcacctgcagagatttaaaaactgctgatctacaagcctcacccaaaacaacaaattagaatccctgggggtggtggccaactgctccctggctgatttgtttcttctttcttttaaattttgtattatggaagatttctaacgtgtgcacaattcacatagtatagtgagctgttcagtattcgtcacccagcttcaatgactatgccctctgccagcctggatgcacacatggccatgtctgtctctcctcagcctcctctggattgtttggaagcaaatcctagacaccttatcatttcacccataaatattccagtgtgtgtctcttaaagataagggctctattttaaagaagaacaacagttattaaaaataactacaatgccgttatctcacccaaaacagggacaataaatcgttaaggcatcaggcagccagttaaagttcaaattatctcacaaatattatcatactccattaaaaagtgggcagaggacataagcagacacttttcaaaagaagacatacctgcagccaacaagcatatgaaaaaatgctcaacatcactgatcactagagaaatgcaaatcagaaccgtgatgagataccatctcacaccagacagaatggttattattaaaaagtcaaaaaataacagatgctggtgaggttgtggagaaaaggggaagcgtatacactgcttgttgaagtgcaaattagttcagctattgtggaaagcagtgtggtgatttctcaaagaacttttaacagaattaccattggatccagcaatcccattactgggtatataaccaaaggaatataaatcattctaccataaagacatgcatacgtatgttcactgcagcactattcacgatagcaaagacatggaatcatcctaaatgcccattgacagtagactggataaagaacatctggcacatatacaccatggaatactatgtgttgataaaaaagaacaagatctgagataccatctcccaccagtcagaatggctattatttaaaagtcaaaaagcaacagattgtggcgaggttgtggagaaaaagaaacacttttacaatgttggttggagtgtaaattagttcaaccattgtggaagacagtgtggcgattccccaaagacctagaggcagaaatactgtttgacccatcaatcccattactgagtatatacccagagtgatgtaaatcattctattataaaggcacatgaatgtgtatgttcactgctgcactgttcacaatagcaaaatcatggaatcaacctaaatgcccatcaatgatagactggataaagaaaatgtgatacatatacaccatggaatacgatgcagccgtaaaaaggaatgagatcatgtcctttgcagggacatggatggagctggaagccgttaccgtcagcaaactaacacaggaacagaaaaccaaacaccacatgttctcacttataagtgggagctgaacgatgaggacacatggacacatggagggaaacaacacacactggagcctttcaggggttggggattgggtggaacatcaggaagaatagctaatggatactgggcataatacctgggtgatgggatgatctgtgcggcaaaccaccatgacgcatgtttacccatgtaacaaacctgcacatcctgcatatgtacccctgaacttaaaaagtggaaaatacaaaaatgaaattaaaaaaagaacaagatcatgtcctttgcagcaacgtggatggagccggaggtcactatccttagcaaactaatacgggaacagaagaccagataccgcatgttctcacttataagtgggagctaaaactacgagaacacatggacacaaagaggggaacaacagacaccagggcatagttgagggtgcagggtgggagaaggaagaggatcagaaaaaatacctatcggatactgtgcttattatttgggtgatgaaataatctgtacatcaaaccgccatgacatgtgatttatccatgtaacctgcacacgtgcccttgaacataaaataaaagttaaaaaaaaattatcatacacttgttttgttctgtctgagatccagataagagtcacacattgcacttggttgctatgtctctgtaagttcactatgtctctattttttgccctcttacatattatttgtgaagaaaccatagtgtttgcctgtggagttcccacaatcggcattttgctgattacatccttgaagtgtccttctcaggtgcttctgtcttctctatgtgttgtaaactggtagttagtctaggaacttaacctgactcaggttagatctttggcaaacatgcttcatagatggttctgtgtgcttctgtcaagaggtatgcactgtccagttgtctgccttttgtaacattatcagtcattgggtgatcattacctagaatttctttttttttttttttttttgagatggagtctcgctctgtcacccaggctggagtgcagtggtgtgatctcagcttactgtaacctccacctcctgagttcaagccattctcatacctccgcctcctgagtagctgggattacaggcacatgccaccatgcccagctaatttttgtatttttagtagaaatggggtttcagcatgttggccaggctggttttgaactcctgacctcaagtgatctgccggtctcggcctcccaagatgctgggattataggcatgaaccacctcacccggcctagattctttaactcagcaccaaggtggagctaatgcccaggcaggactgagaatcactggctgacgtggtcagatggaggagaccatgccccagttctccgctgtctttgcatggcccttggacagaggtaggagaaggtgatgatagtggcccctagttcaaggtccaagttgcttgtgtgtgtgtgtgtgtgtgtgtgtgtgtgtgtgttttcctcttctttcccatcagaacattattttggaggcttatgactgtgacctttgttaaccaatttaggtataatatgtagacagcccttgtttatttgtatggactgggtaattttgaaagtatggcttttctattttgttttagaatatgttatgtgatttgaagatgggacacagtggcccatcagtcttcggttttttattatgctttgctcaggccagtttttataacgtgtttatatctcttgagcatacggtgttcctccaagttttgggggtctgcgatggaacttcacgggggtcggggaaggctgggcagtgaatctagggctctctgtctcagatcctttctcaatttggttactttgtgtttgtgggctctgaataatatttgagttgtaagagggttctgcttttatataaagttagaaagtcacattggaataaataacatgagaaaggtgcccagaagttttctagggctacaacaggctgagctgcagaatttgacacgccaggaattgaactttctcagttgaagttcacgttcaagttaagtaacttgtgtggcatcacacagctagtaagtggggggaccattccagacctaaggctttctgactccagaactcccctttcagccacttctctagtacgtaaggagccgtcacctgggccctcaagttgggggttggtgggggggcatttgatgtcaagagagaggggaagagggcattccaggcaagtggcaggagatcctgagaacacagtttggatgctcaggaggcttccgggagagcacctgatgggcctggctgcagcttgcaccctgatgggcctgacttcaccccctgctctgccttcccaggcctttggatcaggcattgcttatgttctcttccactaggattgagtagggaaagtagaaattcttgcagcttgtcagtaactttgatgaaagacccagcagaaaagcaggaaagctgaagagtaaaaatgatgggtggaccttggttttccacgtggcctaccacagcatgtcaggcctgggggcagaatcttgccatactgtgcagcccaaatttgaatgccaaaggctttcgtttgtctctggggggccacagtctaggtctagttctgtgcaggagttgtaatatttgctcttctctccctcctccagctcgcagacctctgaagagagtgccattgagacgggttccagcagttccaccttcatcaagagagaggacgagaccattgaagacatcgacatgatggatgacatcggcatagactcttcagacctggtggaagacagcttcctgtaactggcggattcgaggggttccttccacttctggggccacctctggatcccgttcagaaaaccactttattgcaatgcagaggttgagaggaggacttggttgatgtttaaagagaagttcccagccaagggcctcggggagcgttctaaatatgaatgaatgggatattttgaaatgaactttgtcagtgttgcctcttgcaatgcctcagtagcatctcagtggtgtgtgaagtttggagatagatggataagggaataataggccacagaaggtgaactttgtgcttcaaggacattggtgagagtccaacagacacaatttatactgcgacagaacttcagcattgtaattatgtaaataactctaaccaaggctgtgtttagattgtattaactatcttctttggacttctgaagagaccactcaatccatccatgtacttccctcttgaaacctgatgtcagctgctgttgaactttttaaagaagtgcatgaaaaaccatttttgaaccttaaaaggtactggtactatagcattttgctatcttttttagtgttaaagagataaagaataataattaaccaaccttgtttaatagatttgggtcatttagaagcctgacaactcattttcatattgtaatctatgtttataatactactactgttatcagtaatgctaaatgtgtaataatgtaacatgatttccctccagagaaagcacaatttaaaacaatccttactaagtaggtgatgagtttgacagtttttgacatttatattaaataacatgtttctctataaagtatggtaatagctttagtgaattaaatttagttgagcatagagaacaaagtaaaagtagtgttgtccaggaagtcagaatttttaactgtactgaataggttccccaatccatcgtattaaaaaacaattaactgccctctgaaataatgggattagaaacaaacaaaactcttaagtcctaaaagttctcaatgtagaggcataaacctgtgctgaacataacttctcatgtatattacccaatggaaaatataatgatcagcaaaaagactggatttgcagaagttttttttttttttttcttcatgcctgatgaaagctttggcgaccccaatatatgtattttttgaatctatgaacctgaaaagggtcagaaggatgcccagacatcagcctccttctttcaccccttaccccaaagagaaagagtttgaaactcgagaccataaagatattctttagtggaggctggatgtgcattagcctggatcctcagttctcaaatgtgtgtggcagccaggatgactagatcctgggtttccatccttgagattctgaagtatgaagtctgagggaaaccagagtctgtatttttctaaactccctggctgttctgatcggccagttttcggaaacactgacttaggtttcaggaagttgccatgggaaacaaataatttgaactttggaacagggttggcattcaaccacgcaggaagcctactatttaaatccttggcttcaggttagtgacatttaatgccatctagctagcaattgcgaccttaatttaactttccagtcttagctgaggctgagaaagctaaagtttggttttgacaggttttccaaaagtaaagatgctacttcccactgtatgggggagattgaactttccccgtctcccgtcttctgcctcccactccataccccgccaaggaaaggcatgtacaaaaattatgcaattcagtgttccaagtctctgtgtaaccagctcagtgttttggtggaaaaaacattttaagttttactgataatttgaggttagatgggaggatgaattgtcacatctatccacactgtcaaacaggttggtgtgggttcattggcattctttgcaatactgcttaattgctgataccatatgaatgaaacatgggctgtgattactgcaatcactgtgctatcggcagatgatgctttggaagatgcagaagcaataataaagtacttgactacctactggtgtaatctcaatgcaagccccaactttcttatccaactttttcatagtaagtgcgaagactgagccagattggccaattaaaaacgaaaacctgactaggttctgtagagccaattagacttgaaatacgtttgtgtttctagaatcacagctcaagcattctgtttatcgctcactctcccttgtacagccttattttgttggtgctttgcattttgatattgctgtgagccttgcatgacatcatgaggccggatgaaacttctcagtccagcagtttccagtcctaacaaatgctcccacctgaatttgtatatgactgcatttgtgtgtgtgtgtgtgttttcagcaaattccagatttgtttccttttggcctcctgcaaagtctccagaagaaaatttgccaatctttcctactttctatttttatgatgacaatcaaagccggcctgagaaacactatttgtgactttttaaacgattagtgatgtccttaaaatgtggtctgccaatctgtacaaaatggtcctatttttgtgaagagggacataagataaaatgatgttatacatcaatatgtatatatgtatttctatatagacttggagaatactgccaaaacatttatgacaagctgtatcactgccttcgtttatatttttttaactgtgataatccccacaggcacattaactgttgcacttttgaatgtccaaaatttatattttagaaataataaaaagaaagatacttacatgttcccaaaacaatggtgtggtgaatgtgtgagaaaaactaacttgatagggtctaccaatacaaaatgtattacgaatgcccctgttcatgtttttgttttaaaacgtgtaaatgaagatctttatatttcaataaatgatatataatttaaagttatactaaggtttcagcatttttgtttttagtttaatcataagaattaaagcaatcctgttctatttactttcttagcaacatttgtaggactctatattaggccttttttttttttttcctgagacggagttttgctcttgtcatccaggctggagtgcagtggcgtgatctcagttcactgcaacttctgcctcccgagttcaagcaattctcctgcctcagcctcccaagtagctgggattataggcgcctgccaccatgcctggctaatttttgtatttttagtagagatgggggtttcatcatgttggccgggctggtctcgaactcctgaccttagatgatctgcctgcctcggcctcccaaagtgctgggattacaggtgtgaaccaccacgcctggcctttattaggcttttgatgaaccaatagaatatctaaggtttaagacattatatgagctagattgttccacgacacagtatttgacttaaagatgattggcacttggctcatctttggtctcatcatttttttgattgttcatctttatcctgtggtgttttcttcccctgcataaggaatacaggactgcagtaactctgtacaacattcaactgtcgtaaaagtgtaggaagtaaaatgttaaattatttttttcaccgtgtcttcttccctgtccctgtcctgtttccaagaggcagagctgcaccacttggtgtgtcttttaaacttccagttccctttgtatgcatctgtgtatatatattcccatacacacatctctacgtttgcttcatatctacctaaatgggttctcactttatgtaatcctttgtaatgttcttttttctttcctttttaaaactatttattaaagcagttttagatttgcagtaaaattgagtagaaggtacagagatttcccctgtgtgccctgcccccacaccaacatagcatctccatcactaacattctccacctttgctacagctgatgaacctacattgccaaatcattacccataacacagtccacagttctgttttttttttaatgctgttttagcgatctctgtgaaaagtatacagaggtattagctccattggatcccattatgtaaatgtaccataatttatgcaatcatggtcttgtaaaatggatttatagtttccagttctttgctattaaaatgatttcatgaacatttttgcaacatacatatttgcatacaaaaatgtgttttgtagaatggatttctacaaatgaaattgctaggccaaagggtgtgcagaaataaattgatgttgagctgaagtcttcagataggattgatacataagttcttgagcatctgcacgtgaatcactggctttgcacattacatgcagttttctagtctctgctccacattgcccaggaatcatggtcttcaaaataggattggaagaaatacaatgtggtaagtgtgagagaatgtgggttttgtgttctgaagcatactgaagcaagtgactttaggaatttaaaaaaatggtacaactcaccttattttgagctcacggataatgaaaattgattatgttgttaataatcagaatatagcaccctattccaatataactccttatccaaattcaagtagcctgcagctggaagcatacttctttggagttaaacctccaaggagggattcagaagatcatggcatatgagaggcaagactagattgcagctcaggacagagcagcatgcagcagcttgcattgtgaattttagctccagatcctgagaggacccacagaccctctgatggaagtggacttctcctgcaggaccggggagacaccccaaatattgtgagttgccccaaatgcggaagtggtacagggagaccctcctctaccgaatgcgcagtcccactggagcagctgaagttttgcttgcgggagaagtttctgactttacctcaagctgagtcaagttagagagctgagcaaaatacaggggtggaggaagcagcagaaaggccctgggagctcgctgagtccccaagcagcccattcctgcctggcaccacagggatccatagggagggtggccagaggagcagggggtaaaactccacagggagaaggaaatctctagctgaactttgtaacaatttgaaaggggcaagaagcttcctggccggaactcgggggagggtgcaaatcgggcgtacagacttcacaggcagaggaagaactaaagcccttttctctcccagctgggaggaggatagccttgggcaagttttcaagcccatcttgccctctgcctggaaacagactcagggctgttgaggtgggcagggtgggagtgagacaagcccttcggtttgtgggggagctgggtgaggcttgtgactgccggctttcccctacttgcctgacaacctgcatgactcagcggagacagccataatcctcctaggtgcacaactccagtgacctgggaatctcactcccatttccccccagcagcctcagcaagacttgcccaaggagagtctgagctcagacatgcctagcctcacccgcacctgatggtcctttcctatccacgctggtagcataagacaaaggacataatcttgggaattctagggctccgccctccactggttcctctccacactactatagctgatgcttcctgggaagtaccaccttctggcaggaggccaaccagcacaaagataaagcattaaaccaccaagactaaggaccctcatggagtccattgcactgtccaccacctccaccagaacaagcactggtatacatggctgagagacccatagatggttcacgtcacaggactctgtgcagacaacccccagtaccagcccagagctgggtagactaattgggtggctagacccagaagagagaaaacaaccactgcagtttagctcataggaagccacatccataggaaaagggggagagtactacatcaaaggaacacccagtgggacaaaagaatctgaacaacagccttcagccctataccttccctctgacagagcctacccaaatgagaagaaaccagaaaaccaaccctggtaataggacaaaacaaggctcttcaacacctcccaaaatcacactagttcaccagcaatggatccaaaccaagaagaaatcctgatttacttgaaaaagaattcaagaagttagttattaagcttatcagggagggaccagaagaaggtgaagctcaatgcaaggaaatctaaaaaatgatataagaagtgaagagagaaatactcatggaaatagatagcttaaggaaaaaacaataaaaaattcaggaaactttggacacacttttagaaatgtgaaatgctctggaaagtctcagcaatagaattgaacaagtagaagaaagaactttagagctcaaagacaaggtcctcagattaacccaatccaacaaagacaaagaaagaagaataagatgcagccataaaaaaggatgagttcatgtcctttgcagagacatggatgaagctggaaaccatcattctaagcaaactattacaaggacagaaaaccaaacaccacatgttctcactcataggtgggagctgaacaacaagaacacatgaacacaggcgggggggaacatcacacatcagagcctgtcagggggtggggggccgggggagagatagcattaggagaaacacctaatgtaaatgacgagttgatgggtgcagcaaaccaacatggcacatgtatacctatgtaacaaacccgcacattgtgcacatgtaccccagaacttaaagcataataataaaaaaaagaaaaaagaataatatgaacaaagcctccaagaaatctggaattgtgttaaacaaccaaatataagaataattgttgttcctgaggaagaagacaattctaaaagcttagaaaacatacttgggggaataatggaggaaaacatccctggccttgtgagatactagacagccatatacaagaagcataaagaacacctgggaaattcactgcaaaaagatcttcacctaggcacattgtcatcagattatccaaagttaagaccaaggaaagaatcttaatagctgtgagacagaagcacaaaggaaaacctatcagattaatggcagatttctcagcagaaaccctacaagctagaagggattggggcactatcttcagcctcctcaaacaaaacattttatcggccaagaattttgtatccagcaaaactaagcatcatatatgaaggaaagatacagttgttttcagacaaataaatgctgagcgaattcaccattatcaaactaccactataagaactgctaaaaggaaccctaaattttgaaacaaatcctggaaacacattgaaacagaacgtctttaaagaataaatcacatagggcctgtaaaacaaaaatacaatttaaaaagcaaaaacaacaaacaaaaaaccaaaccacagaggcaacaaagagcatgatggaagcaacagtacatcacatttcaatactaacattgaatgtaaatggcctaaatgctctacttaaaagatacagaaccacagagtgggtaagaattcaccaactaactatctactgccttcaagagactcacctaacacataaggacttacacagaattaaagtaaaagaatggaaaggggcattttgtgcaaatggacaccaaaatcgagcaggggtaactattcttatatcagaaaaaaacaaacaaacactttaaagcaacagcagttaaaagagacaaagagggacattatataatggtaaaaggccttgtccaacaggaaaatatcacaatcttaaacatatatgcacctaacactggagatcacaaacttataaaacaattactaatagtcctaagaaatgagatagacagcaacgcaataatagtgggggacttcaatactccactgacagcactagacaggtcatcaagacggaaagtcaacaaagaagcaatggatttaaactatactttggaacaaatggacctaacagatatatacaaaacatttcatccaacaacctcagaatacacattttattcaacagcatatggaactttctccaagatagaccatatgataggccataaaataagcctcaataaatttaagaaaattgaaattatatcaagtactctctcagaccacagtgaaataaaactggaaatcaactctaaaaggaatcttcaaaaccattcaaatacatggaaattaaataacctgctcctgaacgagcattgggtcaaaaacaaaatcaagatggaagtttaaaaattctttgaactgaatgccaataacgacacaaccaatcaaaacctctgggatacaacaaaggcagtgctaagagtaaagttcatagccataaatgcctacatcaaaaagcttgaaaaagcacagacaacctaaagtcacatctcaaggaactagagaaacaagaacaaacaaaacctaaacccagtacaagaagaaaataaccaagagcagaactaaataaaattataaccaaaaaaaagataaatgaaacaaaaagctgatcctttgagaacataaataaaatagaccattagcaagattaaccaagaaaagaagagagaaaatccaaataacctcactaaaaaacaaaacaggagatattacaactgacaccactgaaatacaaaagatcatttaaggctactatgaacacctttatgtacataaactagaaaacctagaagagatggataaattcctggaaaaatacaatcctcgtggcctaaatcaggaagaattagatatgctgaacagaccaataacaagtagtgagattgaaatagtaattaagaaattataaaccaaaaaaagtccaggaccagatggattcacagcagaattctaccagacattcaaagaagatttggtatcaatccttttgacactattccacaagatagagaagaaggaaccctccttaattcattttatgacgccaacatcaccctaataccaaaaccagggaggacacaaccaaaacaacaacaacaaaaacaaacaaacaaacaaacagaaaaaacactacagaccgatatccttgatgaacatagatgctaaaatccttaacaaaatactagctaactgaatccaataacataaaaaagataatccaccatgattaagtgggtttcataccagggatgcagggatggtttaacatatgcaagtcaataaatgtgatacaccacataaacagaattaaaaacaaaaatcacatgaccctctcaatagatgcagaaaaagcatttgacaagatccagtattgctttatgattaaaactctcagcaaaattggcatacaagggacataccttaatgtaataaaagccacctatgacaaacccatatccaacataatactgaatgaggaaaagttgaaagcattccttctgagtactggaaaaagacaaggatgcccactctcaccacttcttttcaacatagtactagaagtcctatccagagcaataagacaagagaaaaaaataaagggcatccaaacaagtaaagaggaagtcaaactgtcaccgtttgctgatgatatgatcatttaccttgaaaaccctaagtaaggactcctccaaaaagctcctagaactgataaaagaattcagcaaagtttctggatacaagattaatgtacacaaatcagtagctcttctatacaccaacagcgaccaagtggagaatcacatcaagaactcaatcccttttataatagctgaaaaaaaaatacttaggaatatacctaacaaaggagtcaaaaaacttctacaaggaaaactacaaaacactgctgaaagaaatcatagatgacacaaacaaatagaaacacatcctatgcccatggatgggcagaatcaatattgtgaaaatgaccataccaccaaaagcaacctacaaattcaatgcaacccccatcagaataccaccatcattcttcacagaattagaaaaaacaattctaaaattcatgtggaatcaaaaaagagcctgcatagccaaagcaagactaaacaaaaaacaaatctggaggcatcacactacctgatttcaaactaccctgtaaggccgtagtcaccaaaacagcatggtactgttataaaaataggcacatagaccaatggaacagaatacagaacccagaaataaacccaaaaacttaaagccaactgatctttgacaaagtaaacaaaaatataaagtggggaaaggacacccttttcaataaatggtgctgggataattggctagccacatgtagaagaataaaactggatcctcatctctcaccttatacaaaaatcaactcaagacggattaaggacttaaacctaagacctgaaactataaaaattctagaagataacactggaaaatccctcctagatattggcttaggcaaggaattcatgaccaagaacccaaaagcaaatgcaataaaaacaaagataaatagctgggacctaattaaactaaagagcttttgcacagcaaaaggaatagtcagcagagtaaacagacaacccacagactgggagaaaatcttcacaatctatacatctgacaaaggactaatatccagaatctacaaccaactcaaacaaatcagtaagtaaaaaacaaataatcccatcaaaaagtgggctaagggcatgaagagacaattctcaaaagaagatacacaaatggccaataaacatgtgaaaaaatgctcaacatcactaacgatcagggaaatgcaaatcaaaaccacaatgcgataccagcttactcctgcaagaatggccataatgaaaaaatcagaaaatagtagatgttggtgtgaatgccatgaacagggaacacttcaacactgctggcaggaatgtaaactatgacagccaccatggaaaacagtgtggagactcttttttttttttttttttttttttttttttttttttttttgagacagagtctcactctgtcacccaggctggagtatactggtgcaatcatggctcactgcaacctctgcctcctgggttcaagtgattttcctgcctcagcctcctgagtagctgggatcataggcacctgccaccactcccgagtaatttttgtatttttagtagagacgagtttcatcatgttgaccaggctggtctcgaactttctgacttcaggtgatccacccacctcgggctcccaaagtgctgtcattacaggtgtgatccactgtgcccagctgagattccttaaagaactaaaagtagaaccaccatctgatcctgcaatatcactactgggtatctactcaggggaaaagaagtaattattcgaaaaagatacttgcatacacatgtttatagcagcaaaattcacaattggaaaattgtggaaccaacccaaatgcccatcaatcaacgagtggaaaaagaaactgatatatatatatacatatgcatatatgagatatatatgtatgatggaatactacacagccatgaaaaggaatgaattagcagcatttgcagtgacctggatgagactggagactattattctaagtgacgtaactcaagaatgggaaaccaaacatcgtgtgttctcactgatctgtgggagctaagctatgaggacgcaaaggcataagaatgatacaatggactacgggacttgggaggaggcatgggagggggcgagggataaaagattacaagtatggtgcagtgtatacttcttgggaagtgggtgaaccaaaatctcacaaatcactactaaagaacctaatcatgtagccaataccaccagtacttcaaaacttatggaaaaataaaataaaaacctccaaggaactagctgtaggtgggatattggctgtatctcagttccagctccaggaagaagacagatcattgggaacaagaaccctgctgattaaacaatagctgcctaatacggcagcaacacagggtactccaaacttgcttggataattttgtccttttaaaatgtacaattctacttcttaatacaatgcagacaactccatctactttatctagtcataataaaatgaaaatgacttttactcttcgaatacttaaaacttgttcaaagattctttcacatttacttcttttgattcttacaaaagaagggaagacattttatagatgaggaaaccaagatagcacaagacaaatgacttttaaaaaattgtgtaactgaatactgacagcactaggattagaaactgcaaaaatactaatgccagtgtcatttatactacaacaaaccatgggaaaaggaagaggtacagaaaaatatctgcgctcagaagtaggttgcttgcttcttgagatatttcaaaagacaagtgatgagctagtcagcctgtggaactattctacacgtttgtaatcagaacaatttcttttcagggtataatacaccagttctaataatgggtattatgattttaatagctatgtgcttcacaaaatgcagttcaggaaaatggctaagaatatctgaatccatcataaactaggcaattttccctgggataacagtgatagaaatgtttcattatctctcgttctaaatacatgtaaggattaaatccaactacattgttatagcaaaattaatatactgtgtttataacagacacaatttttcaccccctcccattaagatatatgtgaaaatacatatgtggctttaattagcagattataacattctgttccacgcagttagatacatagcacctgtgtcttaaagaataatgaatatattctccaaaatctattcatctatgggtaatgtttccatcactcacactttcgtttacatataaagtgatggagacatcaaggacacatggtctcacatggcagagggagcatatttgctccctgtttctggtttataggctaattggaattttaaaaagatttgccacattatgctggcagatggtattttgctttatcattattcatgggtattaatgacttccctctggagcatgtgtatcctgtctattttgaatttcattacatttcatgctgactgctctgaacagaatcggatccagtattttctgtgtggtgtttgaggtgcagattgtgtggctggtcaaagttttagacttgattaagaattaagtaactctttgaaataaagaaaacctttttggtctctttcctgagtattccatcagacttctcattttgttcagcttgctatcccacagggttgcatataatatcaggtgtatatgaaggcaattccagagtagattcgtctttcattaccctgagattattagacatcctttctttctttctagaaagactacgacttggtttcctaaaaggagaaaatgcatgagaacacgctgtaataatccagtcacagaaagtcactttttattaattccttcaacaaatatttattagagaacagcctcctctttgtttagctgatctctgaaatgcgtaaatgagacagctggtacagttgatttcaaccagctaattacctgagggaaacactacatcatagagaagaaaactgtggtaggtggaggccacagtccttccttagagtgaaaaagtagaaagccgatggagtaggataaagaataaagcttactggagccttctgataaaactgaagcattcctgcaaccagagaacacaaagtatggttgcagaatttgagaacagggaactaagtaaggccggggtaaccatacctggtagctttacttctgcagtccctgtctttgctttaattccagatactttcatggccaccttcacatccatcctccctaactattcttcaatgttattgagctcggcactgctttaggtcctgaggtttggtaattaatacaacagacaagattcctctctatcatggaagaaagagagagtccctctctggagcagagggcagatttgcttgaagtaggtcctgaggtttggaaattaataacaacagacaagagtcctctctctatcatggaagaaagagagtctctctctagagcagagggcagatttgcttgatgtgcaatataataaagatgatgtctccttctgggacaaacgtttgtcaggtttgcttgcagctcattataaaagattggggtttcctaaatgttgtagtttttagtgcacttatatatacattgttaacttatttataagttatatatttcatgtttttagctgatcctattgtaaatggtatttttaaaatttctatttctatccagtttatggaaattcaattgaccttatcttctgcaaccttgtatattccttagaattttagatgtagacaatgttaactgcaagtaaagacaattttgcttcttccttcccaatgtggatgtattttatttcttctgcttactgtattgcactggctatgaactccagtacaaagtggaatggaaatggcaaaagccacatccttgcttgattcctgatattaagggggaaagtattcagtctttcaccattcaatatgatgttagctatagacttttcatggacattgttcatcagtttaaacacgtttctttctgttcctagtttggtgagaggtttttatctggaatggatgttgggatctgtggaaagtgttttctgcatctcttaagattatcacataattttcattttttcatttcttaatacaatcagcctttgaatctgcaggtttcacatctctggattcaacaaactgtgggtgaaaaatatttttaaaaaacaaataaaaaataatacagcaatacaaataatacaaataaaacaatctagtataacaattatttgcatggcatttacattgtattaggtagtataaataatgtagagatttttaaagtatacaggaggatgtgcataggttttatacaacgccacatcattttacataagggacttgaacatcctcagattttgatatctgcagaggggtcctggatccaatcctttacagatactgagggatgactatatggtaaattacactgactggtttccaaatgctaaagcaattttgcattctccagttcacaccatcttagttatgatataatacgtttatatattgctagattcaacttactaatgttttgttaaggagttttaactctatgcttatgactgatattgacctgtagttttctattcttgtcatgtttttgccttcatttggtaacagagtaataatggcatcacagaatgtgttgggaagtttcctccttttctattttctggaacagtttgtgtagaattgatatttcttccttaaatgtttgatataatttaccattggatccacctggacctggtaattttttgttgaaagtttataaattactagtccaatttcgttaatagacataaggctattcaggataattaattgattaattaattactttttagtgatgagctctccctctctcatccaggctggagtgcagtggcacaatcatagctctgcagcctccacctcctgggttcaagcaatcctcctgcctcagcctctcctcagtagctgggactacaggcatgtgccaccatggtcagctaatttttaattttttggagagacagggtctcgctatgttgccagggctggtctcaaactcctggcctcaagcagttcccccaacttggcctcccaaagtgctgggattacaggcatgagccatcatgtccagccaggatatttacttattcatgagtaagatgggatagtttgtgtttttcaaggaatttgttgatttcatatgttattgaatttattagcatgaagttgttgatgacattattttattactcattactattgtaggatctgcagtgtcccttcattcattcatgatactgacaatttgtgtggtctctctttttcttttgatgattttgcctagaggcttattaattttagcgataatttcaatgaatcagcttttggtttcattgtttatctattccctattatttgtcccattttatatcattggtttctactcattattacctctttccttctgcctacttaggcttaatttgttatttttcccttactttcctatggtagaagcttatataatttatttgaaatcatgatttttctgttttgttttttttttgagacagtctcactctgtcacccaggttggagggcagtgaacgatcttggctcactgcaacctccagtcaagttcaagcggttatcctgcctcagcctgtcaagtagctgggattacagatgtgtgctaccatttctggctaaattttgtatttttagtagagacagggtttcaccatgttagccaggctgttctcaaactcttgacttcatgtgatccgcccgcctcagcccctcaaagtgctgggattagaggtgtgagccaccgcacctggccaattctttctaatacaaggatttaatgctatgtttccgtctaagcattattttagttgccttctacaaattttgattaaatgcagtatggtagataattcaaagcattatcagactacaaaggaaagagcttttagtcaggctaggagaagttgaagagaagcatttgagttgagttttgaaggatatttttttctagtcagagaagaaggtaagagtattctaagccaaaagaacaataagccataattcattaattgatatttctcttataagatgggttcatgaatatttaataactataatctacagatagaacatctctttgaaaggcagggatggagccagtcattcccataaaccaaaagtgatgatggagctgcaaggttgtttggctcttgaagtcatcctcttgagctgatctcattttaaatgagaatggtattggtccaatatagagttaaaacaaaaattctcacatgtgaaattcttggatattgatcagaataaaaacaaaatgaggttcaaatggaagcaatagggtagtggtctggttataactctcaggtataggtacaaagtcatttagatacatatatttatcagagagatattaccttggacactccagctttctatttatttctacagccataagatccttattgtatcatttcttaccctctgctgcagatgctgtatatatgactgagtagattggctcactgaacatcttttctaaacattgccattattacttttttctaatgcaagtgttggaaatcaatgtactcaaattcccttgcagatggaattttattctggccagtaagatgtaggtgcaatttcttgggaggacttccttagtgcactgaaaaagtaaaagcttgaggaaaaggttctgtctttctcattttgctcttcccatttctttctgcctggaacttagaattactgcctggagttgcagcaatcatcttttgaccatgaagttaaaaattacacactgaaagtggcagtccaggagacagaagacaggcttttaaatgacattcttgcataggtgcattagccctgacctatctacctctagattcttttttgcatgagaaaaatacatctttaggcgactattttcagttatccattctttgtaacaaataacatttgtaagcataagcgatacaacctatttgcaacaaactaaaaagttgtatggggatatctgtcattttaatttttaatgtatgctttcttcattgtgcttccaatatatcaaactctcttggtatttctcctgcattacaggttgtttttttctcagttgctttgctgatcctttttttcctggcctctattcatgttagagtgccccaggtctctaggttaggtgctgcagactctctaagagtcttgtttgtttgtttttttggtctcatctaacttcagggcttcaaatactatctatatgctggcagatcctaaatgtatatttgtaacccaggcctctctctctctctctctctcgctatctcgttgtgtgtccaactgcctactcaacatcttcatttgaatgtcaaatagttgatctatctatctatctatctatctatctatctatctatctatctattatctatctgttatctatctatctatcagctatatatatctgttttagagatggggtctcactacattgcccaggctggactcaaagagatcctgtgctcaagagatcatcctacttcagtttcccagtagctgggactgcaggcatgccaggatataaagtagctgatctcttaccttcaaaacaatttccatcacttgagcccaggagtttgagaccagcctgggcaatgtggcagaaccctgtctctactaaaaatgcaaaaaattagcaagacatagtggcccatgcctgcagtcccagctactcaggggactgaggtgggagaatcacctgagcccaggaagtcgaggctgcagtgagctgtgatcatgccactgcactccagcctgggcgactagagtgagaccctgtctcaaaacaaaacaaaacaaacaaaaaacttaacttccaagccagatgcgatgactcacacctgtaatcccagcactttgggaggctgaggcaggctgaccatgaggttaagagtttgagaccagcctgactaacatggtgaaacctcatctctactaaatacaaatattaactgggcatgatggtgcgcacctgtaatcccagctacgcaggaggctgaggcaggagaatctcttgaatccaggaggcggaagttgcagtgagccgagattgtgccattgcactccagcctgggtgacagagcgagaccccatctcaaaaaacaaacaaacaaaaaaaccaaaaaaacaaaaaacttaacttcttccttctctcaagcttgatccaccatcagtgtccatcatctcagttgatggcaactctaattttccagttgctcatgccccaaatcttggagtcatccttggcaatcctctttctcacgttctgtgtctaatctgccaagattctggttctcccttaagcatacctgaaatctattcagaatctgaccgctctcactctctctagtgctgccaccctgggccatgccatcatgacctttcacctgtatgactgcagtaggctcctcaaaagtctccccactttgctgttttccctcccacaacagactattttcaaagcagcagctagaggaatccttttaaaatgaagtcatgatcactcttctgctcaaaaccgtgcaatgtcttttcgtcttacacttatcaaggcctgtcacgatctggccttcgtcacctcttcaaagttctcttccgttctctttgttcacttccttccaacctcacgggcctcattgcagtttctagagcacaacaagaacacacccctgtcatggcctttgaactggctgttccctttgtatggaatgctctttccctagttatctttggataatcctctcacttccttaaagtatctccttaatttcatcttttccaagaggccgactttgacagtcctatttaaccttgccatcggcaccatcccaccatgtccacctctatgctgcccccatccccagcacatcccatcccacctaccctgctcaactttctctttcttcccctacaacgtataatcttctaacttactgtatagtttattgacgtgcttttggttattttctgcctccccttctagaatgtaaactatgtgatgacagaatttgcatgttttgttcactgatacatccctggtgcctggaacagtgctggttcagagtaagtgctcagtaaatatttgttgcaggattgaataaattacccattcacagaaggatttatgggggagcttcggggcagcagactaactgagaaaccaacactcaaatctggcaactcctgaagccagattgaatgttgaccccgaagttccttcccatgtgcatcaactcagaatgcttacaacataatgactgtggccgtctctagtgaaaaaagaacaacagtcttgagagtgactgtatgggaagcttttagtagggacacagctgaaaagcaccctttgcagttaaatagagcttttcttgaatctggaaaaaccaaacactccacagaatgcactcatttgccatcagacttatgggaataattgtatcccagatttaaaaaaaaacccagagttttactggcaacctgtccaagcctggagtgagtgaggctaaaggaagaactagatatagggaaattttttaccccaagcactactggaattaagtacgtgggtgatcttgggtggtggctactttcataaaaggtgtttttgtagaacttgtgaatttctcagaaacactgacttgtacctcactgaggctgagagtttgttctacttctggtctgaataagcaaatgtttagtttcagttcctcttcaaattcaggactgtcgttagatttctatgaaagctacttggcaaaggacccagtccatccatagaggcctgcttcagcgtggagtacagcatacaatagtgtgtatttagactatgctacagctgagggctagccacttgatagagctcctctatgttaatggtgttagaatggaaattctttatccttgtagctgtaccatagggtggggaccagggacactcaacagagttgggagtccatgtgcctccttaaattttgcacctcaggcatctcacatgcctcattctggttgtgatcctgctgcaatctgttctcactctgaaccacatggagttagcattaaatgctatgggaaatctagaaattttctcatgctgagttcctttaaagagagtcaccatcttggttctgatactctctgactggtattggacaagcctttctttgttagcaacttgaaactgtgggaggctctctgtagaattactgttatgttttggaataacaagaacagcattttgctgctggaaaaggccattttccttctgtctgctttttttcatgtattgcctttcttttctttctaaaacatcttttgtttcatttttgttctcaaatcattgtgtttagaacaacaataattgagagtctagcgggaagtttttataaactaacaattgggtttaaacaaaggcttaatagtcaagttctgaatagttggactcctgaaaagttctagctagaatgatcataaatataacatttaaaaaaatacacagggggagtcctttttactaatttttctcttttaagtgaagagttttgtatgcattaggtaagaccaaccaatcctgtttctcatagctctatatctgttgcttggtcagatcacagtgaatttacctgggttataggatgccctgcatctggacaggggtgatgcttcatgaacatgaattcattgacaatattgtgcctgtaagaagctgagtttgctgggaaaaaggcactagcagatcacattcttgagagttagtgataataatgaacatgattataatgtgcaaagacttttataacttttctttttttttaagagatgggggccgggtgtggcagctcacacctgtaatcccagcactttgggaggccaaggcgggtggatcactaggacaggagtttgaggccagcctggccactatggtgaaactccatctctactaaaaataccaaagttagtcgggcatggtggtgcacgcctgtagtcccagctactcaggaggctgaggcagaagaattgcttgaatttgggagacggaggttgcagtgagccgagatcatactactgcactccagcctgggtgacagagtgagactctgtctcaaaaaaaaaaaaaaaaagagatgggggtctcttcatgttgaccaggctggtctcaaactcctggtcttaagtgatcctttcattttggccttccaaagtgctgagattacaggcatgagccaccacacccgtcctgttatcatatattttaaataagcctcatgacaatcacataaattttttttattactcatatattttaggtgagcaaaagaaaattcaaaggtagtaacatagctagaattacaaaggaagaggtgtgatttgtgctcatgtcttaatttttaaagcaaattgaggccgggcatggtgggtcaagcctgtaatcccaatgctttgggaggctgaggcaggaggatcgcttgaggtcaggagttccagaccagcctgagctggtgagacccccgtgtctacaaaaaaaaaaaaaaaaaaaaattagctagtcttggtgttggtgcacacctgtacttccagctacttagaaggttgaggcaagaggagcgtttgagcccaggaggttgaggctgcagtgagctgtgatagcacgactgcatttcagcataggtgacagattgagaccttgtctataaaaacaagataaataaaaggaattgagtggtatcacacagaagttaatgccattgaaagatttttactacatttcccaagaggagaaggcatgtcatgtgacacagggtcacatggggaagcataagaggtcaagaggcagaaggggaaagcataggccacagcctggactgggatttctgcaggaaaggcaaggcgggacagggtaaacagtgtaggactggctagtctacatccttctagcaggctttggggcattgggacattctctagtcacctggtgcctagcccttgggtgtgtgagtttgataggggaggtgatttggggtacggactgaggactggttggaaggtctgtaaatgattttcatgcacctgtggaagctggatttctggggagatgttaacaactttggccattagtttggccctctgattaatggatgctacatagaaatggatgccaaatagaaaacagaacaaagtagcatcagggcaggagccttactccagaggcaaagctctttccatgaaaccatctaaactcatccagttctcctcttccaatctctccaccccttaccgtactccacacatcctgtttgcagtatcagttcttgacgatcccagccactgagttgttttagttggaaatctggccatttgctaagcccttcagttctcatcacacatgtctcttccagttctcatcacacatgtctcttcaagctctccttttctgtctttatgcctccacgcttgccttgggtcagcgtctcctgacccaagtcagtcttgacgtcacagtctcctaatccatattctccccccagcccaaccaagctgcaccctgtttccaggacgatcttttgtaaataataggtttgatcgtgtcacctccttacttacatcctacctacctccctattgccttaaaatttcccagcagaacacaaagggcccttcatgagccgacctttgcctacttcctggctgtctatcctacagaactgtggtattgtgtccattgatttacctgagcacagattttatgaaatgtttggagaacgggggagacagagagagattcttaacccaactggttctcttacagaatgagcttcactggtgttcagaaaattgatgcattgctagtttctttttggctactgtgaactttttttttgaaaggtatatgagattcttgtgcctagaagagggattctaatgcatttgaggtatcggtttcttagggttcaaacctcttgcagctaagagcaggccctggaagaggcaccgggctgcagattgtttcaagtaccacaaggggctgctagagagcaacagaagcgccaaagaaatttcttcaaaatttcccctttttgtcacatcctcatttccttagtcttggtcggaagtaaaatgctttcctctttttggagtttatattagtggctacagctcggtcacaggttatccatacctgtctacctgtaataaatttctgtgtaccaatccctcaaagtgctcatctgcctactcggctgtttggagggactcctgatacgccttcccatgcctcagcttcttgaatgccatttagaggagcaacgtgagtgcatgtatctaccaggggacttgctaatgcattagcatctcagtgtcaattgccaaaggatgcctcttaagggggacaaattgtaaaaagtgctgctgcctccaggcggaactggccctacccccaggtagcctttgggcagaaagaccaggttggattttggccttcacatacctcctttgtcaggcaacctggagaccaacttctagaagaattagtggactaacaggaactgagaatcacgtttatatatatatatattatatatataatataaaatatatataaaatataatatatataaaatataaaaaatatatataaaatataaaaaaatatatatataaataaaattttctggaaattttgcaagcaaactttgtacagaatgtgaattccaagcagttgagatacctgcactttctaaattgtctgaaataaactttgcaattattcaattatagttgttaggtcttaatcacattgagcacagtttttgtacttgctttcagtatatggaattgacatgcccttgtgatttcaaagatgcagttgctaatagactcccaaggggagagacttgggacgttctgctttggttgttgcactcccagttcaagacattgaaagaaatgtggaaaatttccctgatgatataagacagaacattttcttctttcatgcagcaacccgacctgcattatcctttcttgcgtattcctatatagtctcttgaattcactgtcatgtttgattattgtatgaatgatctatcagattaagtttgactgcataaatcacaaaatccaaatatcagtggcttatacaatgcagaagcttattttttatttcatgtcaaagaaacctggaagtcacccagactggtagggtaacttcacagtcatcagagacccagaaactatctttctgctcatttccccacccttagtgtgtagcttccatcctcaagtttacttcatggtccaagagggccaatgaagccccagccattaggcccaagtcccagggaggaaataaagaaaaatagaagagccaaaggttatatgcctccttgctgagtcagccccccttaggacactttttaaaagtctcattcaacaatttccatttttaccccactagccatttttatctgcaaaggatgccgggaggcatagttttctagctgggcacattgagacctttgacaatagaggagtctgttgtcaaggcagaggagagaataggtatggggtaagcaaccatagcctctaccacatatgagaatttaattatctgatgcccatgaaaatgcagactagaaaacaaaatgcaggaagagttaccacacagagttgctgcgttgccctagacagtcatggcagcctagccactggcctgtcggtggactccctcaggctcctcttacctggacccgccccgttcatttaccattcacactctctctatttccagcactgccctctctcaggctccagacttgcatagcaattactgaccatatggctcctcacaggacactaaattcaagatgctcccaaatgagccaggaactgctcctcttagtacctgtgcatcagctgcccaaaccgcacacctgggtgttatccctgactccttcttctgactcatacactttacaagttcttcctgaattactcccggatcctccccatcctcctcatttccaggactgccaccaagatcaagcctgcatcacctctcacctggactgccgctgcagcctcttgacgggccttgccttctttattcttccctctggccaatccattctccacacagcagccagagaaattcatttttttaaaaaaaaaaacaaacctgattatgtcactgcatggcttactactcatcaatggcttcttactacccttagagaaaagcccagcccagtaaggactgaaggccctgtgtgatctggcccctgccccctcactccatgcccttctccccttcgctctggcccagccacagtgattttctttccctcttgctaatgagctaatcccttccctgcctcgggccttggcatacacagttctgtctgcctggcactcattttcctcagattcccacctctttgtttagtgcattaaacaaagcattttttgaggcattaaattcatatacccccaaaccatgccaggttgctggagactctcatagctcactgcccttgtgctttgaagcattcctcagccttctaattacttgctccactgtcagatccttgaggccaggcctcctctctctgttcctctctggaccccttgtacccaacacagcactgaacacctattcattcagtgatccagcccttcattcattcactcattcactcaaagacatttgttgtcatttctgtccccatttctggtttggtagtggaaaaagacttagtgaaataattgcccaaatagtttatttgttagagttaaaatcaggcctgcaagcagaaagagaaggcattatgaacgatgtaaacaagacataggaggtgcgaggagaacggaagatggattttctatcaagaacaagaatgggaagattttctgccatcttgactctaattcttatctccattttcaccctgaaccttacactagaccaagttacataaacccagtgtgagacaagtttagttgaaatattcttttaaccaattaattgccattagtgctgcctccttggagcttctgacttcagaaaaataatccaggaacgttctgccactaattcttctaccttgcccgccaccatttttctgattatttttctactctcagacactctctccatcataggctggctctgctcgtcttggagcctgtgtagaacaggactccatgtgccaagctaaatctgctccgcttcatcatcgcttaggctgccaaattgggtcaatatagttttagaatgtaaaaatatatttctattcagtatatatattatatatatatttatgtgttccagtatatatatactgaagtacatatttatatgttccagtatatatatatatgtatatatatacatatatatatactgaaatatatatatgaaatttataaattgtatttatacatacataaggaaagaatagaaacaccaaggaaggcctgagggcagctttgatgaagattatgggatggttaaccaccaactcttctcttccccagtcatcctggacaattggccattgctttcagcctattaacaccctcaagatgcactgaacatatgttgacagtcaagcactgatgtgtcttagagcatcaggtggtaaacaatgatgagtttcctggctggaatttggaggtcagagactattctggggtccctaatcttcaaacacccagatttcttgtgggccaatctgtcctccacctgccttgtccacgaaggagtagagagtggatgaagaagccggattcttcacgtgaaatctctgagcctggggcatgggagagcccacccaggctcaggcctcagcccaggcatcttacctgcctaagtggtaatccctgaacaggaagaccttttggagaattctttacctcctgtccaaagtggcaagttggccacaagggggaagcatcacacaaagatagtgctctggccgacctgctctttgctctgactttcctattgttatctgggccaggaaggcaggtgaggagggcccactgccgaaggctgtggttcagctgagaccatgcccacctgatgtcttgaatatggccatgaagccaatgaacactcgatgaatagtaatcgacatgtgatgaatattcaggatttaatttattaatgaaattaagcagagccctggaaaagataagcgtaggtggcaaaattcttagatctgaagattcatcatatgctgaaaactgggaattgaacaatctggttccaacatgggccctgcaatgcagtcactggtcgtgggcttttcaggccatcttttggcctcgtctgtcattcccctttctgtctttattacagtgctgctgtgaggatgaagcaagagaatatgaaactggtgatgaggtattgcaaatgtacaagacctacaactcaggcaagcaaaaaaaatgcagcgcagctgatcattactgtagatggtcatgaccttcctgaggtgggggtgcgtgtgtgtgtgtgagagagattcagcctggcataatttagtttaaatcttaggtcaacttaataatcgaaatagccttttaaagctagggtgccaaccttcctgtttgtcaggacttttccagttttgataccccggagtcctgggccctggaacctccatcagtccgaggaaaaccaaaactcaactcaagtctcctcaggctctctgatcccctccccatctttatttattctccaaaaaggctctgggtataattgtggaaggccgtggctcccagactctcagcaggaaagaagagcccagacctttgggtctctgtgcaaaactctgaaccctttctgcctctcttgagggtggcaggactggctttgcagacttggtgggctcccatgctggggcccactgctagagtctgcggcttttgctctttatctcagtctccactgactccatccccttaactctgctctctggccaggccagcagccctcatgcccaccagggccactccctctgcctgtgcacttcccagtcatctgctcgccatggggaggacttgagcagctggaagtgctgcctttgactcatttgatcatccatctccacaacaatgcctatcactgctcttgtcccattacaagctgctgtggcagacaagggcttttcccaaaggcttgcggcctccccagaatgactcggaacacgagcactagcaacatgtctccagccttcctcacacatcaactgggtaccagtgacggcttgtcctgggcagaacttgaagatgaccaccaggattccaggcccttggtgcacacaccttctcccagtattcaaacactcacctaggtgctgtgtgtggtgaagggcttttgcagatgtgattaaaatcccaaatcagttgatcttaaaagagggagattacccaggtggtacagacccactcacatgagccctttaaatacgtgttcagaggtcagggacagataagtcagagagattggaagtgtgaaacagccagaaggagaggccacatggcaaggagctgagggcatcctctagcattcgagagccatccttgtacaaaagctagcaagacatcagtcccacaactgccaggaaaggaattccggaattctgctaacagctggaacatacttgaaagtgaacctttctctagttggtccaccagatagaaacacagcctctttttttttattatttattttttattgatcattcttgggtgtttctcacagagggggatttggcagggtcataggacaatagtggagggaaggtcagcagataaacaagtgaacaaaggtctctggttttcctaggcagaggaccctgcggccttccgcagtgtttgtgtccctgggtacttgagattagggagtggcgacgactcttaacgagcatgctgccttcaaacatctgtttaacaaagcacatcttgcaccgcccttaatccatttaaccctgagtggacacagcacatgtttcagagagcacagggctgggggcaaggtcacagatcaacaggatcccaaggcagaagaatttttcttagtatagaacaaaatgaaaagtctcccatgtctacctctttctacacagacacggcaaccatccgatttctcaatcttttcctcacctttcccccctttctattccacaaagccgcgattgtcatcctggcccgttctcaatgagctgttgggtacacctcccggacggggcggctggccgggcagaggggctcctcacttcccagtaggggcggctgggcataggcgcccctcacctcccggatggggcggctggccgggcggggggctgacccccccacctccctcccggacagggcggctggctgggcggggggctgacccccccacctccctcccggacggggcggctggccgggcgggggcctgacccctccacctccctcccggacggggcggctggccgggcggggggctgacccccccacctccctcctggacggggcggctggccgggcggggggctgacccccccaactccctcccggacggggtggctgccgggcggagatgctcctcacttcccagacggggtggctgccgggcggagaggctcctcacttctcagatggggcagctactgggcggaggggctcctcacttctcagacggggcagttgccaggcatagggtctcctcacttctcagacggggtggccgggcagagatgctcctcacctcccggtcgcggccgggcagaggcgctcctcacatcccagatggggcggcggggcagaggcgctccccacatctcagacgatgggcggctgggcagagacgctcttcacttcctagatgggatggcggctgggaagaggcgctcctcacttcctagatgggatggcggccggacggagaggctcctcactttccagactgggcagccaggcagaggggctcctcacatcccagacgatgggcggccaggcagagacactcctcacttcccagacggggtggcggccgggcagaggatgcaatcttggcactttgggaggccaaggcaggcggctgggaggtggaggttgtagggagctgacatcacgccactgcactccagccggggcaccattgagcactgagtgaacgagactccgtctgcaatcccggcacctcgggaggccgaggctggcagatcactcgcggttaggagctggagaccggccaacacagcgaaaccccgtctccaccaaaaaaatacgaaaaccagtcaggcgtggcagcgcgtgcctgcaatcgcaggcactcggcaggctgaggcaggagaatcaggcagggaggttgcagtgagccgagatggcagcagtacagtccagcttcggctcggcatgagagggagaccgtggaaacagagggagagggagaccgtggggagacaggagagggagagggagaccgtggggagacgggagagggagagggagagggagagaaaacacagcctcttgacaccttcttctgccttcttccctcggctgagggcccacctaaaacatgcagtctcctgacccatggaaactgtgagataataaatatgtgtcatgttaagccactaagtttatgataattttctacatggtacagaaaacaaattcattgccccttctttgcgtagatgggaagaggaaccacctttacatattcctttctccccaactcctttctcccttctccttccctacaatccttccaattggacaggcagacttttccttccttagtacagccagacctgtggccttactgccatgtgggaaggagtcttttctcaacaattccaaagatgtacatgatttgagacctccaggtgtaaaatgactgtgctctgaataccctagcatgatttggaattgaagataactgaggattaatatggtggtttgccattccccaaatactatcccccttacacgttatgaagatgcagatgttatatatgattacagcaaatgctgcaagtggtggtctgaacaaggagcaaaacaagttttactccttgacattttctgagtagatgctcaaacttactaatccaaatttatttatttcactaatattgtctattccaaattaatttatttcacaaatattgtctcaactttctgttactggttgtcaacatagacttagtattggcaaatcatctactcatatttgtgaaatgtgtgtccattaccaggggccactaggctatgtgttaaggccagttagaagccacaagaatcaaagcaacactttaaactggagggtcaattttatttgaagattgttagaaaaagctaagtacttttgatttgtaattcattttattatttttttgagctgggatcttgctctgttgcccaggctacagtacagtggcatgatcacggctcaatgcagcctcaacctcccaggctcaagcaaccatctcacatcagcctcttgaatagctaggatcacaggcacaccaccacacctggctaattttttttttttgaattttttttttttttgtagaaacacggtctcactgtgttgctcaggctggtcttgaactcctgggctcaagcgattctccacctctgcctcccaaagtgctgggattacaggtgtgagtcaccactcctggctcaatttgtcatttaaagcttatttgtaacatttaaaaggaacagtgatcggttgtggaggtgaatgggatcatgcatgaaatttcgagacaaaacaagtgttttcagagaatttataggcttgatttagcctgtgccacagaactcaggggccatgtgaccactcccttctatcattggcaatccatttggggattagaagaccattacctaatcacatgtagaaaatggataggggagagagaaaggaggaagaggtatcagggtttatgagaagaatccaaaaattggtggtgttaggggtctactcccatggtaggagcaccaaagacccaaggctggttgggttaaagtcatagaatcatagcacatttgaactagaaagctttagttagtcagtttttagatgtgtaaatggtactatgtttttatttgtacattattttcacatattcaactagaggtacagtccctcaaggaggactgggatttttatagttgggatatgaagagaattaagaagtcaatgttaagattttgacaaccagaattcactctcaatgcccatttcaggaatagtagttgggaaagccacacattgaattgcaagagccagacacttgagagaaaaaatagcatatttttcaaattcccaaagcttttctttaaatatttagtaacagagcttggaggaccaagcataaattttttactataaaccaaaaagctagaagaatgtaggatatgacaaattcaatttcctgccacacaggaaggcaattttaaactttctgaagtgggaagaagagcttggagggagaggagaggagagagcaagaaaaggcaaatgaccctgggagaaggtgagcattggacactccctaggcaggtttgagggtgagaggagagaggaaatgtctatgccataccctgactgaaactctgtggggatggagctcatcaaacaccctgggcctatgcaataagataattaagttaacatttaaaatcttgtgtgatctttcagccctgaattctgtgatgataaatcttcctacgaagattggatgcatattttggaaatctagaatactggctttactgaaaatttttttgagtttcttctgattgtgaaatgtttgtcacattggggttatgagcactgcagagaggtgtgaggtagtgatcagtattcctctgctcacagcccctttttctactgtgggctgagggtgggtcatcagctttcacagatgacctctgtgaaattctgtgagaactctgacagcatgagctgttgggtttccttcttcgtgcttataaagtaattaggaagaaaaaccagtgaccagtggaagacaatcccaaaggggagacccatatgaactgccggtaattgcctcatcttatacttcatttttaaaatgggttttattgcaatataatccacataccatacaattcaaccaagggtacagttcaatggtttttagtatattcatagatgtgcagttatcacaactttagaacattttcataacacccagagggagccccgtaatgctttagctataatttttttcctctccttgacccacctcccccaaccctaggcaactaataatctactttatttgcttaaattgaattaaatttatttatttaattattttatttattttatttttttagaaacagggtcttcctctgttgcccaggctggagtgcagtggtgcaatcacagctccctgtagcttcaaactcctgggctcaagtgatccttttgcctcagcctcctgagcagctaggactccagtgccatgccaccatgcccagctaattttaaaaaatattatagagatggggtcttgctatattgcccaggctagcctcaggctccttggctcaagcaatcctttcacgttggcatctcaaagcactgggattataggtatgagacattatgcctggcctactttctatctctatagatttttctgttctggacattttatacttaggaatcatataatatgcagccttttgtgactggattctttcacttagcataatatttcaatgttgtagcatccatcagaactttattcctttttatggacaaataatattccattgtataaatatggcacatcttgtttatccatttatcagatatgaacatttggattgtttcctcctatactacattttgtgtgtcccctagcatctgaggttttactactaagctcctaacaatgagacctacttcccttttctgaaaacataggtggactaagaaaccctgttccctctggaattcagacaaatcaaattatatatgtgttgagtgacacttgaggtaatgccaaagacagaggcttagagagtaccttgcagtggtttgtaatgatggtgatccaggcagaacctgagaggttcagggtctgacattccctcaaaggtgatcaggctcaggaggcctgactcacatcaaactcaactgaaaccccaacctaaacccaaaccaccttagaaaccaggaagctaatttataattttataatatttccaaacagacctggaggccagagttggctgatttacatatgaccttcctgtagggaagagtacaggagatgtcaggttactatcagataattgccttgcagtgcaggcataagggaccggataactttaaagaattgacatttaagccataacagttggacatgcttccatatatgcctgataagctttcttctggtcatgacactgcttctcaatagtactggataaacactgaccacctcttgccattttcaccatctccttcttctcattccaagttgagcactagccttttatgtatgctgaaattttagaacacaattatttagaacagtaatttccaaaaacattttggggagtgctaatcccatatatatttatttataaattatatacatgcactaaaatttatttgtatattaatttatatgttcaatgaaagtttatttctataaatatttattttttccaaagtcaactaaagatggatatttctataaataaataaataagtaaataaatagtcttgttccccccatttaacgatctctgttttggattttgttgttgttgctgttcttgcattaaatccatctcaggtctacagttctattttaaccatctgatcttttggttgggtttactttcatttgtaccagccttagaagcccatcttttaagggaggttatttagaagagggcagaagggctacctcatctgttttatattgattccgttagtttcaattttagctgaggtgacattttttgttcatctcccgagattccagagagaagcccactgcagccttctaagcactgactgaaaccttgcaggggagttatattacggacttaggcttctctgagaagagaaatggtaggagatgagtgtctggagtgggtggggagagttacttctagcctagcagaaatgtgggttaatggcaccaagatggtgaaattgggggtagtaaaagaacatgagaattggcaagaatgatggagagccaatgctcattagcagttagcctgttggaagtaggcactgtgttctgcctttgaactacactcagtaatggactgtggagatgctcagagaaattgaagtgaagctggatcccctagagcacagaacatgatggttccagaaaattatctggtcataaatgagagacaccagtaaattagaatttgggtactctagagggaagagttttggcttaaaaaaagaatgagttgggtttccgatgaaaaggaacctgcttcctgggagaccaatgttgctaaatgagagaattctacccttggacggtttttaaagttgcaaattggaataacctgggaagccataaaaatgctggtgcctgagtctcagtcctagactttctgatttcatccatttgagacgaggtttggccactgagattaaaacaaccacatacagaaaacctccagatgattctaatgtgcagccaaggttgggaaccattgcactagaggatggaagaatggagtggcctaaggaaattagaggaggaagcttggggaggaagtggagggacctgaacagcctaagtaatcctagaaggctgaacctcagagcctttgtgacttcatccgcctcactcccatagacactggagaagggattcacaaagaaaaggaaacaggaaaagcctgggatttctactgcatgtcaggaaagtgaccatgaaactgagtcgtggagccttctgtttaggagctgacctccgtcttggttgcaactgcaggtgttactcaataattcccttgcaagcccagtgctggaagcagcaaaagtcctccataattggtgtctcttattgggtccgttgccttctctcccttctctgcaccaagccccccacccccaccctagcctctgtgtacagggagccctccagcccaaccatggatttctcttcaattctaccattttccaggcatgagaaggaaggggagggaatgacttcctttggcctagaaatatctgggagaatatgctatacggtccttgagcagacacaaaagagaatattctggagctgcattttccaaagtatgtttcttagatgctggatcctcaaggtgttcctccctgtgtccgcgcaagcttgggaaatgcagcaggcttccgcgccctcgttgagattcacactgcctgtgagtagagtaaatgctttgagatctggagaaagaaacctgtttgtttttctttaaccctcacatccccaactcatctggccatggaattgtttttttctgcttaacacattaacatcttgcctctttctcatgacacttttgggaaactgcctcagaagctacaatcagtggcttcattcacaaaggacaaagaaggcagctgcatcctgcacacatgaaacggggcaagaactccagttaggccctggcctctcttggtaattgtgccctttttccaccccctctgcagcacccccttcccgttgccatggcaacgccccagagagtaaggaccaggtcttctatttctttcttacatcccttctcctcaccctgctctgtgtctagaagagagctgaacacgcagtaggtaatgtttgcaaaatttgattgattgagggtttggggggtttcatttgggccatctgcaggtgggctgggtagcagaagaaggcctcccatggtttgcttctatgtatctgggtagaggagttggaaaagacggtgggagagtgcaggtctgggagctcacacagctttggcactgcctgttttttttttcgttttgtttttgtttaatgctacaataataaatatttcacaaattaggaatggtgaagggcatgacaaaaaaagaaaacgttttgatttcttggtatgtcagggttcaggggtaaatttttctttccataaaatgtctggtcatgttgcttgttataattttttttttttttttggtaacaaataatttccttttaagttggaggaaaaaagagaatgtcttacttttgcctatgtctctaaatggtgaccatattttcaaagctccaaaccaggacacagagcctgatacacagccttacaggacatttgaaatggggggctgccaggacagagtatttggagtggaggtatctggcctcctagctgctgtgcccaatgccttaggagtaacatcatttctaaattacagatgcagtgaggccaatttggatatccagtggggaaacctggggaccatatatgttctaaattgatatctgcctatctatctaactatctatctatctatctatctatctatctaccatctatctatatttttctatttattgccagaaagtcaagagcagccttcccagaggacaagacaacaacaaaacctacagaaattctctctagggtctcagtacatgcaagatctggctctttgctgcctgtgtggctgcccaatcccagcctcagcaatgtctgaatgaagggtttgtgggcatctgcatgatgcaagccatgagctggggagccgcacagtatgggttctgtcttctggctggctgaaaaggcttctcaggctctgaaagtaccaattcttcaggcatgagtgctggtggaggattatcttttaaatcagctggttcttattttcttaagtgtgaaagaaggagggtggtcaggagtgtgtttgcgtatgtgtgtgtgtgacaggccaacattagtatagtatctgccatgtgctgagaactttatgcaaatcttgtatataattgccatctatctatagatatgtatagatatatatatagatgtatatagatatttgtggatgtaggtatatctagagatagatagcaatttatatatgttttatatatattagatatatagctatatatatttcagatatatatctgaatgtatatcaatatatctatacacatcaagttattttatttttacaatactcttttaatgctgataaacagaaaagaaaatgggctgggcacagtggctcatgtctgtaatcccaacactttaggaggtcgaggaaggaggattacctaaagccaggagtttgagaccagcctgggcaaaatggtgagactcccatctctacaacaattttttttttttttaaagagagagaaaaaaggaaatagaggctgaaagtgggaaaaaagaaggcttactttggtcacacagtgggagagcagctgagacttgtttgggaactggctcaggtctgtctgaaccaaagagttctctccatgtcaccatcttccctgccatttcaacctttagaatactaaggactaaggcaggaatgagactgaaaatatgggccaaggatagtgcagcaatcccaatgccttcctgaaatttccaattgaaaatcctactctccaggcactgtggctcatgcctgttgtcttgacagtgtgggagacagaggcagaaggatcagttggggtcaggagttcactaccagcctgggcaacatagcaacaccctgtctctacaaaaaataagaaagaaaaaacaaatcctaccttccttccacaccacacttcctgtccttccttccttccttttttccttccttccttccttcctccctccctccctccttccctcccttccttccttccttctttccttccttccttccttccttccttccttccttcatttttcctgggtcttcttcatggcataatcctggacctggactctcctctctttctccacagtcacttcctagattattttacccatttccaaggctctacataccatctctacagtctgataacttggaaatttttatttcttgcaaagatttctgtcttccatacttcaaatctatgtgtaaaatcatatattcaacatttgcctttggatgactcatagtcgtttacccaaatatggcccagatggaatttatgacccattcctcggcctgcttctttgagttttctatcagcaaatgaagtccatgccccaagtttctcacaccggaaaccttagggtgtttcttgatggcggcctccttctcatccccacattcaatgagtccccagatactgtctgctttacctcataaatctgtccagaacctgtattctttttattttaatgagatgatttatttattgggcaactaatgtgagctaggtacagctttggtaaaggtatttgaactgcctaaaagcccaggcaggtagggatggttttctctattttcaggtgagaaaacagaggctaagagaggtctgttactctcccagcatcacatagctattcattcaagcctcttgttcttttcaacacatttcgatatctacccttgaaggccctccataaagaactcaggtcccaagttctcaagaaggtcctagtagttcagaaagacatttctggaagcttctggattagaagtagatgccagagctgtgcaggaactctaaaagggggtgagggacaggaggtgggtgaacaatggagcctggagaatcatctaggcaattctgacagtagttattcttgaaagaagaaaagaatcgggctctgaggatattgcaaatatggagaattactaacattggcctgggcagcgatggttgtcaccttgtagagcaagacctggttactgacatgctggacaagtttcctagggggaagagtggggaaggaagtacttacaccttccttggaatgctttctggtgtgcgaagccagctaatagtcgataaaaattagggaggctgtgagacttgtttccattttaattggtcttgacccttggcagtgatagtcacccaatctgtctcttaaaatatttttttcttacgctttgccagtttatagcctttatagatcaatctttatatttcatgtaggggagagagacagagagaaaaaagcaaggttattgatgacctaaactggattagcagaacctgtattcttttttttttttttttttttttttttttctgagacagagtctcgctctgtcacctaggctggagtgcagtggcacgatctcagctcactgcaagctccgcttcccatgttcatgccattctcctgcttcagcctcctgagtagctgggactataggtgcccgccaactcgcccagctaattttttgtatttttagcagagatggggtctcaccgtgttagccaggaaggtcttgatctcccgacctcgtgatccacccaccttggcctcccaaagtggtggaattacaggcgttagccactgtgcccggccagaacctgtattcttatgcccacattcatcagcttagtctaggccactattatttctcactttagttaggaggtataataacttcctaactagactcttaacattcatttttgccctctttccagtatattcagcatacagtagtcaaagtaatcctttaaaatgtacatttgattatgtcaggccactgtctacaatcttctagtagcctctcattagatttagaatcaagtttaaaattatttccatattctgcagggggatgatattcaaaatatttactcccctatacagcagaagcacaaaccaattagaactgatgttaatttcggtgctggagcaagatttggagatgggtgcctgtggtgctggtgtcacctctttaatcccagggagtccaaggggcttctgagaagggccacagcagcagggagtcgggaagtgtcatcctatttgttgtcagcattcagtttagaaaacaaaaatcaccctaggtatttcaaacacaagggtaatcaggaaatctgttacacagatgcctggatatgaataacttcaggaagcagctaccattcctaggactgaagcaattaaaagggaagaggtggggccagaaagtagcaactcagaggagagactcctgcctactggtcctggcacctcaggtgggacacggtggggctggtgatgggtgtgacaaaagcggcacaagtctggaggagctgccgtgtgctgtgggagtgacaggaactgatatttttgcactctgtacatccagcccattgtatattagctgactggtagccctgcctccaaggatgccttggcctgcctcctccagccccttctgtctccttttactgcacaacctcccttgctcattgtgctccagtcacactggcttcttttcatgtccttggacaggtgaagctcttcctgcctccagtctgtcactctcattgtgtactctgtcttctgtttacctattgctatataaatgaccaccccaaacttagtgttggaaaacaactgtaatcatttattttgttcacgcagctgcaattcgcagggattggagggaaggctcgtctgctccatgcagcatcacctagggtggactgactaagggtcacagcatcccctcaaggcagttccctcatgtggctaaaaatctgctgctgtcaactcagccacggcttaggcctggggtctcagttcattccacaggggcctgtccatgtggctgggttccgagggtgagcttctaggagaggaggctgattggaagctgcatcaccttttatgacctacctccaaagttaaacgacatcatttcaaatatgctttcttggttaaagcagtcacaaagatctgtccagggacagaaggaagggacatggactctggcacttgatggaggaggggcaggttccagaagggcatgtggggcagactatggttgtgactagttttggaaaatacaatctgccactctttttttaactagtcatttctgagagtctagtttaaacttcacccatttctctaggttaggtaccccagacacaaatacaatcaaggcattcctctcctcctttgtggctcttatcataatttcacaatatacagtaatttatgtaacatttttgtttattgtcttttgtttcttgtctgtctttactttagactggaagcttctgaatctaaaaccatgtcttccttatttggccctaatctgcagtacttgtttcatcacctggcatgcagcaagtgctaaataaaatctcactgaatgaatactgtaataaatgttgagcaaaatctgccccctcccctccaaacaaatcatgaattcaagtcgtatttggtcataacttcatcacgaactcatgcattaaatgaccgcaaatagaaaggaatggtaacacaaatttcagttatgactttgtaaatagctaaaaatttcttgacttaatttcactgttgttgatagatgttcagtacagaaaaccatatattcatgtgggcattcctcccaaaaaaagctcttttcaaaccagagagaagtttcatttgagaggctgttggcccaaacagcctgattatcactcacagggctgatatagtaatcttcagccagggggagtctggcaatatcacagaaaggacaatttctctccttgacttgtaaactgttcaccttcaggctgagtgtggtggctcaggtctataatttctgcactttggaaggctgaggtaggagaatcgttagagtctaggagttcaaaaccagcctagtgagacaacataatgcaacatagtgagaccccatctctaaaaatttttttaaaaaattagccaagcatggtggtgcatgcctgtagtctccactaattgggaggttgaggtgggaggattgcttgagcctgaggattgctcgaggctgcagtgagccataattgcgccactaagcttcagcccaggcaacagagggagacattgtctcaaataaaatagaataaaataaaataattaaattgttcacttttggtcagagactttgaacatcaaatcaaataaaaatattagtaatttattcaaactcagaatcctaagatgttagagaagccactgctgtcgtttatgaggtgggggcagggatgagacggaggaactggtggaatggagaagggggttcgggtggggttctgggtggaatattaatactggttaaggacaagcttcctcccaggtgctttacatgtgtgatttcatctcaaccttaccatagtcctgtgaggtaggtagggccatccccatgtgaaagatgagaagatcaagggtgcaagtggttcaatactgcgcccacagtgacacagttcacaaatggatgtgttaggattccttcttcagttctcagtggttccccagcccacataattcctactgcaccaaaaatgcaggttcaatttaagagatgtcaacaagctgtttttgggggctctcaggtacaccaagaactgagcaaacagtggcctaatagggaccacatatacttcctccatttgctgatatgggtttgatatgggcccagttcttccaaatcctaaaattataagaaaatagggatatcagtggcagaataaattggtatatttcagaatgtcaattttccaaaatgtagtaagagactcaaaaatctttttatcctagaattccacaattcttcaaggaaaatatataatcaagatcatgcacgaagccaggtgcagtggctcattcatgtaatcccagcactttgggaggcctaggtgaggggaatgcttgaggccaggtgtttgagaccagcctgggaaacgtagtaaaccccatctctacaaaaaataaaaattagcctggtgcggtggcatgtgtccatagtcccagctactcggaaggctaaagtgaatgtattgcttgagcccagttcgaggttgttgaattccagataaggatggccattgtagttatacctacaaaataaaaaagaaaaaaggaaggcaggaaatccagtaagggatttaaaaaactgtggtatttttatataatggaatgttatgcagcctttacaaatcactctttggaaaaaacatataacataataacaaggaaatgctgaagatatatttttaaagtgcaaagaaaaagcatatactcttattcaagcttggctactttatccttcccttgctaccccacagtagagctaagatacagctctagcatttgactggaccatattataggtttagggaaaatgaaaaatacaaacagaaagagtaataagaactagaaaggctggcctgtgaatcgcaggttattcatattcagctgtgactccataaggagatgcctctttctctgaccctggtgatgggcaaggggcatggttaagcctctgataggagagtatctttgggagtgagaaataaccaagtctcctcatctgcccaaaaggcccatattccaagtttcagcctcctgtctgcccacctacctcttcctgaattatcaatacagggaacacccagcttgtctggagaggaccacaggactatagattggaggtgccaagagatcaaacagcatcagaatgggcacatgaaatacaaaaactacttttagtatataccaatataaaaatcttgtttcccccaggtaaatggaaggaagcatcaaatcaaacaaatcaagactataatctgaaaggctagagctttgaattgtgttgatttctaaaagaatggcttgttagctcaaagtagcaaataattaatggaaattctgtgtcctcccttaagagtctagaccagcactagtccaatagaaatataataaaagcacctatataatttaaatttttttagtaggcacatttaaaaagtaaaaagaaacaggtgaaacaaattttgtattatatgcaattaataacatgttatttaacccaacatatcaaaaatatcacgttatcatataacataatgaattattaatgagatattttatattcctttttggcatcaagtcttggaaatctggagtgcatcttacatttataacgtatcttaatttggactggccacatttcaagtgcttggtaaccttgtggggctgtggctacatgttgaataccaggtctggactctaaaataaacctaaatagaaattggaactagaggatcatggcggatgggaggcaggactagattgcacctctggagagagcagcgtgtggaggcttgcattgtgaattttagctccggattgactgcaagaacaaaccagcaatcccgagaggacccacagaccctctgaaagaggtggactactcctgcaggaccggggagacactccaaatactgtgagtgccccaactgcagaagtgggaaaggtagaccctcttctcccgaaagcacacccccattggagaagctgaaagtttgtttgcgggagaagtttccgactttacctggaactgagtcaagttagacagctgagcaaaatacaggggtagaggaagcagcagaaaagccctgggagctcgctgggtccccaagcagccaattcctgactggcaccacggggatccatagggagggcggccagaggggcaggtggtaaaactccacagggagaaagaattctctagctgaactttgtaacaattggaacgggcgggaagcctcctggccagaactcgggggagggtgcaaatctggagtacagacttcataggcaggggaagaacttaagccctttttttcccccacagcttggagacagatagcctcaggcaagttttcaagcccttctcgccctctacctggaaatatactcagggatactggttgggggtcacggtggaagtaatactggccgttcagtttgcatgggagctgggtgaggcctgtgactgctggctttaccctgcttccctgacaacctgcaagactcagcagaggcagccataatcctcctaggtacacaactccagtgacctgagaatctcacctccatccctgacagcaggtgcaacaagatccacccaaggagagtctgagctcagacacacctagccctgccccaacctgatggtacttccctatacaccctagtagtgaagacaaagggcatgtaatcttgggaatctagggcccagctcaccgccggttcctcttcacactactgcagttaatgctttctggaaagcaccacctcctggcaggaggccaaccagcacaaaaatagagcattaaaccaccgaagctaaggaccctctcagagttcattgcaccctccaacacctccactggaacaggtgctggtatccatgactgagagacccatagatggttcacatcactggattctgtgcagacaacccttggtaccagcctagagccaggtagactcgctgggtggctagattcagaagagagacaacagtcactgaagttcggctcacaggaagccacatccataggaaaaggggagagtactacatcaaaggaacaccccgtgggacaaaagaatctgaacaacagccttcagccttagaccttccctctgacagagcctacccaaatgagaatgaatcagaaaaccaaccctggtaatatgacaaaacaaggctctacaacacccccaaataatcacactagttcaccagcaatggatccaaaccaagaagaaatttctgatttacctgaaaaagaattcaggaggttagttattagggtgatcagggagggatcggagaaagacaaagcacgatgcaaggaaatccaagaataatagaagaagtgacgggagatatattcaaggaaatagatagcttaaagaaaaaacaatcataaattcaggaaactttggacatacttttagaaatgcgaaatgctgtggaaagtctcagcaatagaattgaacaagtagaagaaagaaattcagagctcaaagacaaagtctttgaattaacccaatccaacaaagacaaagaaaaaaataataagaaaatatgaacaaaggctccaagaagtctgggattatgttaaacaaccaaacctaagaataatcaatgttcctgaaaaagaagagaattctaaaagcctacaaaatatatctgggggactaattgaggaaaacttccctggccttgtgagagacctagacaaccaaataaaagaagcacaaagaacacctgggaaattgactgcaaaaagatcttcacctaggtacattgtcataaggttatccaaagttaagatgaaggaaagaatcttaagagctgtgagacagaagcaccaggtaacctataaaggtacatctatcaaattaacagcagagttctcagcagaaaccctacaagctagaagggattcggggcctatcttcagcctcctcaaacaaaacaattatcagccaagaatcttgtatccagtgaaactaagcatcatatatgaaggaaagatacaggtcttttcagacaaacaaatgatgagagaatttgccattaccgccactacaagaactgcaaaaaggagccctaaatcttgaaacaaatcctggaaacacatgaaaacagaacctctttaaagcataaatcacacaggacctatgaaacaaaaatacaagttataaagcaaaaaccaaaaacaaaaaaacaaaagtacacacataacaaactttaaagcaacaatggtaaaaagagacaaagagggacattatataatgataaaaggccttgtccaataggaaaatgtcacaatcctaaacatatatgcacctaacactggagatcccaaatttataaaacaattactaacagacctaagaaatgagatagagagcaatataatagtaggggacttcaatactccactgacagcactagacaggtcatcaagacagaaagttaacaaagaaacattggattgtttcttggagcaaatggacctaacaaatatatacagaacattttatccaacaaccacagagtacacattcaacagcacatggaactttctccaagatagaccatatgataggccataaaatgagcctcgataaatttaagaaaattgaaaatatatcaagcactctctcggaccacagtgaaataaaactggaaatcaattccaaaagaaaccttcaaaaccatccaaatacatggaaattaaataacctgctcctgaatgagcattgggtcgaaaacaaaatcaaggtagaaattaaaaaattctttgaactgaatgataataatgacataacctatcaaaacctctaggatacagcaaaggcagtgctaagaggaaagttcaaagcagtaaatgcctacatcaaaaagtctgaaagagcacaaactgacaatctaaggtcacacctcaaggaattagagaaacaaaaacaaaccaaacccaaacccagcagaagaaaggaaataacaaaggtcagagcagaactaaatgaaattgaaacaaacaaaaacacacaaataataaatgagacaaaaactggttttttgaaaagataaattaaatagatagaccattagcaagattaaccaagaaaagaagagagaaaatccaaataacctcactaagaaattaaacaggcgatattacaagtgacactactgaaatataaaagataatgcaaggctataatgaacacctttacacatataaactagaaaacctagaagagatagatagattcttgtaaaaatacaaccctcctagcctaaatcaggaagcactggatatcctgaacagaccaataacaagcagcaagactggaatggtaattaagaaattaccaaccaaaaaaatgtccgggaccagatggattcacagcagaatcctaacagacattcagagaagaattggtaccaatccttttgacactattccacaagatagagaaagaaggaacccttcctaattcattctgtgaagccaacatcaccctaataccaaaaccagaaaaggacacgtccaagaaagaaagctacaggctgaaatccttgatgaacatagatgctaaaatccttaacaaaatactagctacctcaatccaacaacatatcaaaaagataatccactatgatcaagtgggtttcataccagggatgcaggattgtttaacatatgcaagtcaataaatgtgataacatcacataaacagaattaaaaacaaaaatcacatgatcctctcaatagatgcagaaaaaacatttgacaaaatccagtattgctttatgattaaaactctcagcaaaattggcatacaacagacatgccttaatgtaataaaaaaaagccatctatgacaaacccacatccaacataatactgaatgaggaaaagttgaaagcattccctttgagaactggaacaagacaagaatgcccactctcaccactcctcttcaccatagtactggaagttctagccagagcaatcagacaagagaaagaaataaaggtcagctaaatcgataaagaggaagtcaaattgtcactgtttgctgatgatatgatcgtctatcttgaaaaccctaatgactcctccagaaagctcttagaactgataaaagaattcagcaaattttccagatacaagattaacgtatgcaaatcagtagctcttctatacatcaacagctaccaagtggagaatcaaatcaagaactcaactccttttacaatagctgaaaaaaatgaaatacttaggaatacacctaaccaaggaggtgaaagacctctataaggaaaactacaaaacaatgtgaaagaaatcatagaagacagaaacaaatggaaacacatcccatgctcatgatgagctgaatcaatattgtgaaaatgaccatagtgccaaaagcagtctacaaattcaatgcaatcctcatcaggatacctccaatcattcttcacagaattagaaaaaaacaattctaaagctcatatggaaccgaaaaagagcctgcatagccaaagcaagactaaacaaaaagaacaaatctggagcatcacacttcctgatttcaaactttactataaagccatagtcaccaaaacagtgtgctactggtacaaaaataggcacatagaacaatggaacagtatagagaacccaaaaataaacccaaatacttacagccaactgatctttgacaaagcaaacagaaacataaagtggggaaatgactacccttttcaacaaatggtgctgggataattggctagccacatgtaagagaataaaactggatcctcatctctcaccttacataaaaatcaactcaagatggattaaggacttaaactgaagacctgaaattataaaaattctagaagataacattggaaaattccttctagacattggcttgggcaaggatttcatgactaagaacccaaaagcaaatgcaataaaacaaagacaaatagctgggacctaattaaactaaagagcttttgcatgataaaaggaacagtcagcagagtaaacatacaacccatagagtgggagaaaatcttcacaatctatacatctagtaaaggactaatatccagaatctacaacaaactcaaacaaatccacaagataaaaacaaacaatcccatcaaaaagtgggctaagaacatgcatagacaattctcaaaacaaaatatacaaatgaccaacaaacatatgaaaaaatgctcaacatcactaatgatcagggaaatgcaaatcaaaaccacaaggcaataccaccttactcctgaaagaatagccataataaaaaataaaaaaatagttgatgttgccatagatatggtgaacatggaacacttctacactgctggtgggcatgtaaactactacaaccactatggaaaatggggtggagattccttaaagaactaaaagtagaactaccatttgatctagcaatcccactaatgggtatctacccagaggaaaagaagtcttcatatgaaaaagatacttgcatacgcatgtgtatagtagcagaattcacaatcgcaaaaatgtggaaccaaaccaaatgcccatcaatcaacgagtggataaactgtggtatatatacacaatggaatactatgcagccataaaaatgaatgaattaacagcatttgcagtgacctgggtaagattggagactgttattctaagtgaagtaactcaggaatggaaaaccaaatatcgtatgttctcactgatatgtgggatctaagctatgaggatgcaaaggcataagaatgatacaatgaactttggtgacttggggggaacagtgggaggggagtgacggataaaagaatataaatatgatgcagtgtatactgcttgggtgatggttgcaccaaaatttcagaaatcaccactaaagaacttactcatgtaaccaaatatgacctgcaccccaataacttatggaaaaataaaaaaattataaaataaaattaccataaattaaaaaaaacctaactaatatttatagaggtgaaaaaaggagcctatttaaatatttgacaatgctggattggttaaataaacaataatctatacaatggaaccttatgtagtcattaaaaatactgtttttttgttcgtttgagagtgtctcactctgtttgttgcccaggctggagtgcagtggcacaatctcggatcactgcaacctccacctcccaagttcaagcgatgcttccgagtagttgggattacaggcgtgtgccaccatgcctggctaatttttgtattctttgtagagacaggtttttaccatgttgtccaggctggtctccaactcctgacctcaagtgatctgcctgcctcaggcggctcccaaagtgctggcattacaggtgtgagccaccacacctggccaaaaaaaaaaaaaaaatatatatatatatatactatttttaaaaaagcaggtaaccaaatggactttttggtactatttttctaaatcatgtgttgtatgtgtgtatgtacatagacccccatgtctctctcattctgtagtcccttccctgcttcttttttcttcttagctgaaatcattcaattatataacatataatatgatacatttgcccagtcatttgttcaatttctgtctcccccgagaatacaaaagcctattgtgcataaaacatatttctaggtcctgagtatcaaacaccgaacgaaaatctaaaatatgcccctgtctgcctgaggcttaatttttagtgagggaagactgtaaacaaacaaccaaatgagcaaatctgccgtatcatatataacctccctccatattttatcatctcatatgtgctttaatgaaaagagcaacacagcaaaacagaaaaggccaaggatgaagcacaatgaggggggaatggggagccccttttttaagtaggtgctgagggaggatttcatggctgctgtttaaatagggacttgaacgaagtgaaggagcaagccaagcaggtatctgggggaagagatttccaggcagagggaacggtaagtccaaggatgtttacagaaatgggaaagactgtgagaaaatggagtactagcgggctggaatcaagatttcagtgtggccattttaaagttgagatgccttcatcaaaggactatatttaaaagtatcaactggtgtccaacaggctggttaatcagaagggattttcaatgaatcagagctgataccacttataaacaaacagtaaggccatattggagcctaccagggatgcctattagatgtccaagtggagatatgtaattctggagttcaggggagaaatttatatcagggctggagatacaatatggggattatcaacatataggtggtaattttaggtcctgggactgaagagatcaccaagaaagttggtatagagataagcaagtgaaaaggttgagcactgggccaatcttagggttggggagaggaagaacttgcaaaagtgagaagtggccgtggagataggagtaaaaccaagaaagttggtgtgctgggaaacaaaagaagaacgtgtttcaaagaaagtgggatagatgtcaagtgttcctgcaggattaagaagagcactgagggctgaccattggatttggacatggggaggtcactggcctggacaaaagcagttttagtggagtggcaggaatgcaagcctgcgtggagtgtgttcaaggcacaacaggagccagggagtctagacaactttgaagattgtgtgctaaaaaggagagcagagaaacagggctgccgtgaaagaaggatgtgggggccacaaagatttgttcattgtttgtttctttgttctggatgggagagattacactatgtttgcttactgatagaaatcatttggcatgggggaaccactgattaggagctaattgcataatgaatctctgagtaggtaaaagaaaataaaatcaagcgcagaataaacagtaggaacatggtcagttcatcccttgtaccaggagggaaggcagggtatatagacacagatgtggggttggtagactggttggggagaatgtggaagttctctttttactgattcagtttgctcggtgaaatacaaagctagaccattatagctggaaggagctatgtcaaggtgttaaaagtggctctctctagtaagtggaattacaggcattttttttgctttaatattttaaatttctctctaatatgatacatcttttcttaatgacaggcagcatctttaagtgccctccttttctgctgcttataaggatgaacctaacctgccacttaccagttgtatgtctttgaactagttacttacatttttttttaacttttcaaaatttaaaatttttattttttaaattggcaaatagttgtacatactcatggagtacatagtgatgctccaatacatataatgtatagtgatcagatcagggttcttaaaatatttgtaatctcaaagttacttattttgggggggtcttggtttcttatttgtaaacggagatgataatgtctgtgctatttagtccactggtctggaagaatcttaaatgagaaaatgtatataaaaataacttgaaaggaactagtatggcatggatagaaaatgttcctattgtggttatttctggtctctgtagggaagtaggaggcaggggagggatctaagaataggctggaatcatcaactcattccttacaaactattcaatagtggtaagagcaaaaactacttttctgattcagatagtgctgcatccttttatcaaacttttgactaatattaaaagctttgtgttcagccctggaaaacaaaacacaaaatatgtttcctttgcttttacgttgagttaactttattatttgacactctaagttaaaatgtttcctagtgagccaggtttttctttttagctttagatacattaattttgaacatttacccacatttttgcatttgaattcaaaaccagccagagaatatatagctatgattattcttttgttattttttcaaattactgtgattgcattgttagatatgcttcagcacatgggtcctgctggcctgtcatcattagacagattcatagaaatctactaaataaaaaatcacaagataaagataaaaccacttatttaaggcactttgtacgaattaagtaatgatagtggagtcacataactcttcctcaagtataattctgaactgcttttgtgtttcttggcatttgaatatttcattgtcagcctaaagattataaaataaaaagacaataccgagctttcactgttctacaatgtgtatactattgaagataaatgcttattaatctttgctttcaatttacttacagccccccacccttttatggtaagaaagtataaccccagcattaaagaacattttgaaaaatgagaaaaacacgaccactgcatcatcagaatataattattttcccttttgtgtgttcctggtttacctttgtctttttatgtacatagctttacatggtttcaatctcagtatgcgtacaattttgaatataaatttagggtttcatttaaaagagaattttttcaggctacagcataatttcatgtttctaccttttgtcaaaacttgactatgtcaaacaaagcctgagatcaggagaccttgttaagacatctgaaacaacttcaatgatctcactgctctgtgctccttcaggactgcagaaataattgatcaccttgggtacctaataaacccctcacagggctgctatgatttcattctgaaggggccccagacttggaatcatcttccatagaatcatcaggaatcaaaggactcttcttccagagcgggaaatgcctcttagggggtgggtcagggacaagatctgatgagtgtctcccatgtcttctcagatggtccttaattaaaattttgagtactttttggttttcatcttggtgaaaatcctatgatctaccctgtctcaggataattacaacaatgaagcatatttcataattgttgcttatttcctgtaccgttatgtttccagtttgtggtagattgatcgcaaacatggccccaattttccccccttcttgtatccataccctttgcagcatgactttacgactattccccatttggaatctggggtggccaatggaatgcattagaagtgatggaggattagttctgagtttagaatttaagagattgtgcccacatcctctctccctggtggaacactatctaactgccatgtccactagactgccttagcctgctggagaatcatgtggattaggaacgagtcaaccgaactgaggcccagaccccaaacctgctgaccacacatgcccgggggagcccagtcaaatttagctaagcccagtacaggtaagcagaactgtctagctgagaaatcatacctaattgctatttaagcaagtaggtgttttttgttgttgttgttgttttttaagacagagtctcactctgtcacccatgctggagtgcaatagtacagtctcagctcactgaaacctctgcctcccaggctcaaaccatcctcttgcctcagcctcccaagtagctgggactacaggtgtgcaccaccatgccccgctaatttttgtgttttttgtagaggcaaggttttgccatgttgcccaggctggtctcaaactcctgggctcaagtgatccgcctacctcagcctctcaaagtgctgctattacaggtgtgagccactgcgcccagcctacgttgtttttaaaaattatttattcattttccattttttgttaatgaaacacatttaatgcctatgccctttgacccagcaatgccatatctagaatttacaaatatgtatacatttacacatgtgacatgacaaagtacaatgactttggtgcactgtttatgatagtaaaatactagaaacagtctaaagtggttaaataagttatgtgcatttatttattttatttgtacaaatttatggggtacaattgtaattttggttacacagatatattgtgtagtggtaaagtcagggcttttagggtatctatcaaacaatgtatattatacccattaatttctcatcacccatcccctgccaccctcccacccttctgagtctccattgtctatcattccacactctaagttcatgtgtacacattatttagctccacttacaaatgagaacatacagtatttgtctttctgtgtctgagttgtttctctgaagatcatggcctccagtttcatccatgttgctgcaaaaaaaaagaaaaacccatcatctcatttttttatggctgaatagtgttccactctgtagacacactacattttctttatccaatcatccaccgatggacacttaggttgattccatgactttgctgttgtagatactgttgctataaacatgtgtattcaggtgtcttttttttaatataaaaattttttggggtagattttaagtagtggaattgctggattttatggtagttatttttagttctttgagaaacctccatactgttttccatggaggctgtactaatttacattctcatcacagtgtaaagtgttctcttctctctgcatccttgtcaacagttgttgttttttattaagtgactacgtagttgggtgatttactgtacagcagtattttggaaatacatattaataaaaggttctatcacattttagacaattatttttttcctcttgggttcctatttgttgcgaaattgaggtggggggccatagagagagagaatatgccttcctcccattaccactacttatattccatgagaggcctaagattttttgaggctgtagattgaatgaggaggacttctaactgcccctgcccctgaattcttgagctcagacagccgaccttagagctttcttgctgctttcttaaataaggttagtgtgaagtaggactacctttattttattttttctccttttaatccaatctatgaacctataatgtcttttcaacagattttcaagtgagcaggaaaccaggaaagataaatgaaaagttgagtggtattgttaaaggagaaatggtctctacggctgtaaggtaacatataattaacctcagattcaggccaggactcagataatagaagtgctcaattcaaaagaaactcacaaaccacctgaaatgtaagcaattcctctttacataggaaatatgctgttgctttgttgttatttattttcattctaattttaaattatttatgatattatactcacctttatctcagatgtagcatttcttagtacagcatgtatataactacataattcatcatataaaattatgttgttgtatgggcttaggtatctcatagaccaagaaattccccagaaatagcaataattcttcaacgaccaggcccagcatgagctagtcttggtcctatatgtgacactaggttcctgatttcttattaacgtgctctgatgaggaagttgattgagttatttcaggaaaagaaagaggtgaactaaatctgcccttctcttacatttaaacattcattttctacattttattgtaaataaacacataaacatatacacacacaactagttttagaaattatcaaaatacagaaagtagaaggaagaaaactagcctctcataatcctatcacctcgaaacaaccactatgaacagcttggaatatttatttccagtgtttaaaattttttcctatacctaattggaactgcaaatacataaacagaagacactcatataaaacctaagtgagaagttgggcatggtggctctcacctgtaatcccagaactttgggaggctgaggagggcagatcacctgaggtcagaagttcgagaccagcctgggaaacatggtgaaaccctgtctctactaaaaaatacaaaaattagctagcgtggtggtgtgcgcctgtaatcccagctacttgggaggctgaggcagtagaatcgcttgaacctggaggtgggagttgcagtgagccaagatcacagcattgcattccagcctgagcgacaagagcgaaacttcatctccaaaaacaaaacaaaacaaaacaaaacaacaacaaaagcctaagcgaggataagagcaaagtcagaaattcttctgtatttggaagacaagtgcatagctctccacccatttccccctgtaaagggtgagcacaatgacagtcacagggagagtggtggtgatagtgaagtgaagtcgtggacagacaggcttagctcaggacctggtagagtgcaaaattcaccattaatcacaacaaacagagcaaacatcagtctagtgcttactacatgccagacactgttctaatgacttcctgtattttaactcatttaatcctcccaacaattctgctagaagcaggtactagaattcccattttacacctgagaaaatgaggcacagagccattaagtaacttgctcaagattggagcctggattaaaattcacagtctgtttatggtgttgtttctcttaaacaccatgtgctcattttattattttctttatcgtaattgttcatctcactccctcatggactccaataggcactctggccattttgaaggagcccatttggcacagctgtggagacttcgtctcaccattgcaatcatttatcgacttaaaagcatattcctttgaaactgaaatctgagtatcatccatcacaattcatttgtattattgcccatccataccttttcgtctttccacttttctttcagaacacaataaattatattcaaatggcagtcaaggaggaaacttttcttcctcatcaacaaagctgatcgatgggggctgaagccccagggaagaagcatctgttgtaactcaaggatcccggcttgagctgaggatggaattaacaggcacagagtggttggcagcccaacgtttgtgcaagtctggcacatgcacacatcattagcaactatgctggagaagaatgatcaaggaggtgaggaggggaatggatctgattaaagggatgttcaagaaaggaaattccaagcacttgggtaaaagcttcatagctaaaatgaatgaactcgtgagcaaagcaaacagccaggtacatttgggagatgctgacagacaatctggataattttgcctctgaaactttcaaaacaaagtcatttcatgcagtgaattccccagagtggctgcctctttcacttagctccttcggctgtgtctccttcactaaaatgaagcccccatgaaggcaaaaattttgctgtcctgttcatggctccaatcttggctcctggttgataatattaaatattcatggaataagttaatgtatacttgtgttgactcaagctaggcagataagcgctgagatattcaacagcattcaaaagcaatgtgcatgctggaagaatggcatggttcaactaaaactgattgttcacaatagtgtatagaatcagtggtgaaatactggcagaatatctctttgtgtgcccaccactactgtaagcaatggaagagatacaacagaaacatgatcacgatcagcagcaaacatttgccgagggcttgctgttggcccagcatgttctaagctcattactcgcgttagcatgtttaattctctcagcaccacctatggggtaggtaggtacaagtgtaatcacccccatttgacatccaaggcagctggtgccagggcgatttagcaacttgcccggagtcctatagctagtacacggtagagctgggattccatctgctctgctgtttcctgccagtctctgtagtcctgaccctccgggaatttacccttaatttaaggacacaaaagggacacatatgaagcagagaacaattaagtcttaaactctgtggccctgaaaacaaaaaagagaggagtaagtgtaggcttgttttcagagagaccttctggaaggaggcagtacttgcgctgtcttgaatttcatcattagtttgtatatccatctacccaacctcacatctagtcatcctctcatcctcccatatactcgcctaacaaacatttattaagctccaactaggtgccaagccctgagcactgaagtgtgggttttgtgctgaaatactcatatttcagttgcttgcttatatagggggtcttccttaggaaggacagattggtgctgttgatcaaaactgaaaatgctcacaccctgggtacagcaatcccaacagaattacccaaggtgaaatgacctgtgttcaaggttattctctgcagtactgtttttgacaacaaaggattagaaatagcccacatgttcatcaaaagggaactgcttaaataaaacatgatagcacacctaaagagattactaagctgctgtgacaggagtgaagaagctgagagggagaaatctttaagacatttaagtgaaaaaagcaaagaggctatgtataggatgccaccatttggataaagggcagagggaatagaaacatctttggtttgttatctataaaatatttctggaaagatacaccagacgctgataagatttatggctttcggtggagggagcaggtagtcaaaaggcaagaggaacaggaggggttttcgctgaatgtcccttggtatgttttaaattttgggcctttttgggaatgtattgtctatattcccctaaaaacacacacacacaaagaaaaaccaaaactcatgtgcccagaccccagtgttaatggtatatcaatggtggagttctagtttggttccttaactctcccaaggcacttagaagggaatgctgggtgccaggatgggttcctcaactgcctgacttgcacctaagtgacatatagtttctgtccttggctgagccaggttcccttacagaagtcctctcctttagccagggagcttcttcctccatctagtgtttgcaattttcctccaatctagtgtttggaagagggtggccaacatgggcctgattgggagggtgacatttgtgcaaagcctgaagtaggtgacagcatgagccctgagggcatctgaaggaagggaattccagaaagagggaatagcaagttcaagcattggaggcagacatgagccaggccaggtggcaggtgtgcctggaatagagtaaacaaaagggagagaagcaggaggcaaagacagagggaatgcacattttgtgtgggagtgagggcggtgtgaactgtgctgaaataatcatgcatttccttggaaattccacatccagacactgctgtttgtttgctctgctgtttgttggcactgaagtcccagttctactaattggcctacctattggttcctgagccccactccccatccagcactcatgactggtgtcggtgtcccagcctcattccctgtcttggtaaccagctctgtagcctggtctctcccagctgctacctgggaatggggacgtgtcatggaatcctggtctgggctggagagtgctcccagttcataccctgcggggactacaggaccatgaagaggagagactgcaacagggaatccaggagctcttccttcagccctggtgctaaggcggtcttcctgatgtctcccaatccacacacctttacctcaggtaactgaacttgttgactttgcacaaattacttcctcattttgctcaggtgaaacatccttggtgtcctcagagaggtactccctgaccttctgatgtaaagtagccacgttctagcccagtctctgtccccttacccgtgtaatttctttgctgcatatatggttttgtttattgtctctctctccccactgaacgccagcttgaggagagtgagggctttatctaggatcccaacacctgcaggcagtttggccctcctggtacttgtttcagtgagtgcgtctggttctagatttggtttctccaagtcagccctctgtctcactggagtgccagactctgaccatggtgggaatggagagtcctaggaagttggatgagatgtgtgaccacacagaatggcatatggacggagtgctaggaacacaaagcccttagccctggtccccatcctgaagcagaggtgacagagacaagaaaggtagcgttcaccaacactttgcagaaaaaaatacagggtcctttcacctgctcaaaattgtgcttctttggtattatcagagctttaaaatgagtgtaaagtgcttattatttgaagggtcacagttgtcatgagatggcaacccacttttattattattgattctttactcttgagaagcaactttgacaccagtggatttgggttcaaattctggctctcatacttgctgcctttgggcaaatcaagccttgctgagcccatgtcctcatttaagatgggaatggggcagtgggaatgaggggataatatctaccttcaccactgacaggatataacatgtggagtagagtctttagtacatagtaaatgctcaatgaacgttcaacatttttcttcttcctcagccctcctccacatctgccattatgaaaggtagttttcaggtacttagtggtctacaagattaatacttgcctggaaattgtgaggactatgaaaataaagtctatgatctctgagttcattctcatttattatgttcttttatgttcaatatcctggtcacagatctaatatccataagagctcatcaattaatatttttcttgtattggagtcacactataattcagcccatatctttaccaatgcacaggtgtgttagtcaaaggctcagctgctgtaacaaaaatactcccaaacacagtagctcagtgataggagcttatgtcttcttacatgataatctgggaataagtggctgggctgaatttgtggctctgatctagaaggatatccagaggcccaggttcctcctctcttgttgctccactattccctagggtgacacttttgtccacactatctaaaggagagcaacaccactatatccacactttagtctgaggggagagagaggaagtcaaaagcttatcctttcgtttcaaagaagttgcattaactgcttctgctcctaatcttttggcacaaacttagtcatgtggctatgcctggctccaagggtgcttgcaaaattttatctttacctgagtggccgtaggctctgtgaaaacttagtaactggaggtctatcactaaaaggaagatgaggaccaaggatattggaggaggggagtgggggcagtagacttcttaacactcttggtctgaatggaaccagatgagggtatgactgactggcttggggcaagccaatggccactagagaaaagcaactgctgacagatgcccagagctttctttgagcctgcaggtggtaggttttgagtaaacagtgagtacatacctttttcccctaccattaaaaaaaatgatgtcatccagcaaaaccaaggataaacagtatcatgcctgtattgtatttttaattgtttcatacatttggatccatatagtaattgcatacttggatccagattgctttagaactcagctgaagtttgtctgaaattcagaaccaagatgttgtagctcaggagggcctcgtgaccattggccatctttaggatcagtgcagaaactgaaagccgatgcagatcatgtgctccttcgatggtgtctgtggttgcacagaaagctgcacggtcacaggaaaagcctctggaccagggtgccaggtcttaggttttctaattccagctcttacattgataaactctaacttcaattatctcagcattcatgcttccaattccatttccattaaggccagaaggagcaggatgccacagtatttgggggaaagaataacttttaacaatcatgaagttctctacaaatgtcaactacaactgcatggtgctaggatcttcagaatcctcagactgaggtgaaacagacacagcagagagcacactttgcttctgcttgtattctcatttcagttcagggaacaactgtatacccattctctcctttgagcctctcatttgaagtggataattattgtattattgttattattttcattttacagatgaaaaactgagatgcaaggagattatgggtatgattcaaggacatatcaatgataggtggttctctgctgcctctacttccatgatattgagatcgatttttttttttttttgagacggagtttcgctcttgttgcccaggctggagtgcaatggcgcgatcttggctcactgcaacctccgtctcccgggttcaagcgattctcctgcctcagcctcccaagtagctgggattacaggcacgcgccaccatgcccggctaattttgtatttttagtagagacaaggtttctccatggtcaggctggtctggcactcccgacttcagatgatccacccatcttggtcccccaaagtgcttggattacaggcatgaaccactgcacctggcgagatcgatttaaaaaattacattaggacatacctgtgaaacgaatgggtagtactggttaaaaaaaaaaaaagcagtcatgttagaacactttagactttgtcctactaaacagaactcctgtgaacacttcagttaactttccacccactcctgctttgggtatcaagatagggaatagtatcagtgctatggaacaggtagtcttttgggaatgtctcacgtgttttggccacactctggttgataaagcaggttcacacaaatcaacaggcctgtgagctgaaggaggatgggactgagtcatatttctctttgcaggtgcttctaaaatcctatgggatgaatgctcttgtttggtccttaggacagctcagaaatataagcattccatgacatttccatggaataggcccagagatggaggctggaggaggccttgtcacaggctgggtgtcacagagctaagacaccacatggctggggctggacagtggttccccgttctcctatctcagtgcatctctcgccccacaccctgctcagccctccagctgccttgtctctgaacccaaagccctcacttgtatgccctctgaagcctcctgtgattatccattttctctcagaagaagctgaagtcttttcttcagggaataaattcagaacttgagacaattggcctgcttcttgctttcaacaaatatggaaatgcagccattaaaacacacagttcctgctctcgaaaatacaactgtgttttcctccccttcatccttgctacagagatttgatcacaggtctattttatcacttggtttttctaacaaatgaacagaagcagcagaactatcttcagagtccctgaggcctcctcttgtcctctgtcccagaaacccaagtttcattttccacagcctagtctctttttccacagttaaactgaggtaaattccaaatttttctgcagatcctattttgatctccattgactctaagattcaccaccctactctttgcccctcaaatcggaccctctttttttttttaaaagaaataataaattaattcatcaatttattcagagacagggtcttgccctgtcactgaggctggagtgaaatggcataatcatagctcattttagtcttgaccttctggcctcaagcaatcctcctgcctcagcctcccaaagtgctgggattataggtgtgagccactgcactcagcctaattcactcttttgataaatggtaccatttataagtaaaattcccaggcactacctccctacccctcatggcaggtggattgtaaaatgaccccaatgattcctggtgctcaccttcttgtgtaatccctctccttgagtgtgggcaggatgtggggatgtgggattggcttttttttttttttttcctgaggcaggatctcactttgttatccaggctgaagtgcagtggcgcgatctcagcttactgcagcctttacctcccaggttcaagtgatcctctcacctcagccccgctagtagctgggactacaggtgcacacaaccacacctggctaatttttgtgtttttttgtagagatagagttttgccacgttgcccaggctggtcttgaactcctgagatcaagtgatccacctgcctcggccttccaaagtgctgggattacaggcctaaaccaacatacctggcctgggatttgcttttaaccaatagaatatggcaaaggtgatgggaaatcactgttgtgattagggtaatacaattgcaagtcctattttgttaaaagacctagtctttcattgattttgatagtttgcgagtctgggttgggaaatgggccccttgctgtcttctccaatccctaatctcctccaagcagacccctgctgccgtgcaaatcggctcatgcacatagatgcatcagacaggcttgaggcctgggctcaaactggttccacctgtttcgtgtgtttaactgctggagctctgcaggcaggactgcgttttgtttttctctgtatgccagcagtgttgcgcatggtgggagtgtgatgaatatcctatggatggacgacctgcccagcattccccgaggaagtggactgaaggatgcccacagcagctgggtcttagcagcaagagtgtcatctgtaaccataactaccctttgataagaaaacgagagcaggaccatctgtaggccatctgggagacccagctctggtgactgggtcctggcacatgtatttgctttggctgcctcctttttctctagagagcagggactttgtatccccagagtccagcacaagcaggacctcaatcaatgtaggtttgaatggggtttccattgctatccagtgtcttagcttggattctcctcagaacagaccctaggacaagacttgggtgcaggtcgtttgtttaggatgtgatcccaggaagcagaagtagaggaagtgatattgggaagagagaaaagtccacgaagggcacgttattgtgtgagttactgctgtgggccagtggccttagtcctgtcaaagggtccatgggaagcttgtgcagcctccacagagtcacccaccagaacacagggaggctggggcaaattcgccaactccagtcccattggttatatgttgcaaaaataaataaataaataaatacaaaaaaacaaggttgcctccctggggacttaatttgccacacttctgggttgttcctgacatcagagcaagctctgggatgtgagaagccctcaggcggaggagcagagagtgtgacaggccagagatgggaagctgtcagcaggctgaagctagttgtccacctccgccgcaggtgaacgcaggtagatgcaggtggacacaggcaacttgagatgtggcgggggtgggcagcaaggggctctgctaccccagcctctgggatcgggaggggaaggaagcacaaaatcattgtttttcattgaaaaacatctgctcctggagtcagtctctttgaggcaggcttgacaatttatttttggaaaacacaagaaagatcagtatttttagtcattagttttagtaattattaatgacacctccattctccaaagagttctgctttggaaaataaattgtcacaataccattagacggtaactgtgaccacacccacccattcccactcccatcactaagagcttgttgcacgtgtgttctgtgtccacctctgttctgagccaagaatcttcgaagctggctaggtgcagtggctcatacctgtaatcccaacactttgggaggccgaggcaggtgtataactttaggtcaggagttcaagaccagcctggccaacatggtggaaccctgtctctactaaaaattcaaaaattgggcatggtggcacacacctgtaattccagctacttgggaggctgaagcaggagaattgcctgaactcaagaggcagaggttacagtgagctgagatcgcgccatgcactcttgcctggtcaacagagctagactctgtctcaagaaaaaaaaaaagaacaagaatcttcggagccaataggtgactctgtgaaggctgcacaagcttccccatggaacccttggcggacggagcccactggcccacagcagcaggtcactcaataatgtgcccttcatggacttttctcttcccaaatcacttcctctactccctcacttctgcttactgggatcacttcctgagctcagaatcttctaagccaatgagatctaagacttcagggtcaggagctggcttcatccctatttatacaggagagcgggacacccagagggccagggaagggcacccctttcccattaaattcgctgcagcctgccttcctccctacactagcagagtgcttggcccgtcacttgtttagctttcagtccatcctcctgtcccaggttccattccaaattcctctgggactcccaggtgtctcagacccctggtcagctggcgccttgaccttctcatcttcttccagccccttttctctagggctggacccagctttccgatccttccctgacttacggtgctaaatatgaagcacccacatttttgccagaagccctctccatgcccccacacccttggctcagacctgagtcctgcactacatcagaattgagttcattgcaccccttggccttgaatctgggctgctggaagggtttgccttctgctgctgcctcagttgcttttctctcatttccatttcaagcaagtcctggtattcccagtgtgctctttgaccaagacagagtctgggtcataacaagatttggcacagagggtgctgaaataaatgagaaaaactgaaggaacagaaatgatgagttccatgagatttattcattcataaaagtatgactgaaatattgagcaacacagttccagaatgacaggagctacttaatgcttatggacttgcatagacacaggagcaggcccagaagtcccagggcttctgacaaccagatgggtgagagtagggaggcatcatcctcattcatttcccatgcaactcagagtgcggattcctcttgtggctcaggaaggatggcgtttggccaggaaaagtgcattgcatgtagtgtatcagctacatggccctggaaatagcaatagtgttgggatgttttttgctcaggcctcgagtttccatgaagcaggtaattctgtcctctttctgcccactattcactcatccccctgcctgctcctaacctggttgctcacaggaaagacacattcagctctgttctaagttttatggggccaggcatctggaagcaattctgtgataaccccctgttgctggggcttcggtgaggagtccaatactgggctgcagcattagaaagcctaagccttaagccatgctctccttattggctacattgtaacaaaggatattttgatctcattttccagatactcatgcctatctatcaattagttctcagctccagtgggaacagggaggttaatcattggacttcctcaaaactcaccgtgtcattccaacttcatagcgtcggtataaggattaaatgagtctttagaacagggcttcgcacttagtgaaagttcaaaagagttagctattttttttattattagtaataataacagtaactcagcccctcattacacctacatgttgagaaaaaaatgaacaatataaagtatgtacttcaagcattggcaaataacatttgggacaagggaaggagaagtggatggaatagcatacagcaaaatgagaactgggagaaaaaagtgggccctatgggatcagtcactccaagacctaaggagaggcacagactgcctccctgaaggaaggctcaggaccttgcctccagctgtgggctgctgtgggcagttggtcagctccttccagcagcaaatcctgaaaaggatcattctaccattgtgtggcaggagtgccacacccattgtcacctcaaaggccaggagtggggaggaaggtagtatctttttctctttttccatttcttgctcctggagggaaaatggagaaaaggagaaagcagcccagagcctccaaaccatattaagttcaggtcttgctgaggcagagaggagggccatgaatgcagatttcttcatttgttcgttcaaagtcctgttgatgggaaggttcatctgttctcattatttataattaaaatattgacggattggctactatgcatctacctcagctcactgtttaatttgggtgttaacttgcccggggaatatctctaagaaagatgccaataactcattagcagcttataaaggatccttttacttttcttccaagctattttaaaatgcaacagttgggagatttatcaagcatttgttattataagttattactgggtgtttcttataacttgcctgagggtggcagcatttacaggggtctctctaattttccagtgactccccaaatgcacactatgactttcatttttattttgaaggaattcaaggaaatttaatatcctaagagggggtgcaaattgtggagagatagatatcatggaaatggaaatgttccattttacattattcacagagacagctaaagagccttgctggcagccaacacattgtttagagtgtctctagaaagtctgtgctaggagtagtgggtgagggggaagacttggtgcccctggcccttctagtggtctgatctcaggacattccagcctcacctggtccctagtgatccaagatgaagcagtattaaaggagagccacttcttcaatccctttagtctctctatgtgactctttcttctcccctgagcacatagttgggattgaggggggactatgatgtttggctccactagccaagggacccgagtctaggattgggtttggggactagagctctaggtgcatgactgggtgggattgcatgagagagactctaagaagcctgatagtacatagtactgaacccctaggcacctcagcactccctcatttatggggattcctaccactcccctaaacctgacttatttaacaggataactcttattgctatgtagagaataattatggagaaggaggcaagaatggaagcaaagagaactgttagaaggctacagagataatccagggaagagatagtgtctgggaccagggcaggttcttcaccactattaatagtttatgttggataattccttgttgtggggggctgtcctgcgcattgcacaatgtttggcagtatccttgacctctatgcactagatgccagtagcacctctaccagatgccagtagaaccctctccatgtgacaatccaaaatgcctccagatattgccaaatgtccactgagatgcaaaattgccaaatgggattgagaccaactggactagggtgatagcagtgaagatgtaagaagtgatcagattcaggatttgttgagtttatgcatgagggatgagagaggaatcaagggtgacttcaaggtttttggcctgagtgaggggaaggattgagtttccatttacggagatggggaagaccattggtggaacagggtttgagggcagggcagcctggagttcatatgagagttctggactggagttcagtatatgtatcacattgcttatgtaatttcagaaaagacaggaaggagctaatggctaagttcatggagatataaatggtattctaatcactacagggaaaggaagcattgccaagtcttctgaggaccttggggccacagatatattctaggcagtcatgtcttctcaggtttgagacttagggttaggtatgtcttatctcagtaagggtcagtggtcaccctgcactgtagattcttcctatcagagaggtcaacaggatgtctctggacctttagaatcaaagcaatgggccagagccaagtctctgatgtccacagccttgggtctgtattgaattatttatgagttcatatttgccttaattattcaatgtttgatttcaccacacggaagaggaaggcatagtttggagaagaaactgacacttgaatgacttgcatatctgatttatcaaactgaaaaaaaaaccattttcttcatttgcaaaaagtccattgtgctttacctaacatcctttggatagagcctgagctgaaaagtattttgctaaagcacagctatatatagaaacttctcatctgtctgaagatataaacaactgcaggaagtttggaatatgttgttaagactgttctcttggtttcctcgtcacagatcctcttgctattctgcagagaatatgttgctgtctatttggtgtgtggtttccgctgctcctttcttcctaaaatttcagcggaggctcttcttacttcactatgttgaagatactgactaaaaagaaaatggcgcactgctttccaattgaatgagcagattttttcagtgtctgggaaaacaataaaatcctcttctcttctcttctcttctcttctcttctctctctcttcctctctctctctctctctctctgacaggatctgtcacccaggctggagtgcagtggtgtgatcacagctcactgccgccttgaactcctgggctcaagcgattctcctgccttagcctcccaaagtggtgggtttacaggcgtgaggacagtgcccagccaaaaatctcactatttcagaatggagcttgcaggagagaggggtcaggaggtagagacagaggcccttacttaattaataaaaattctgcgctaaagaattttgtttttactttatttcttttgagtaaatacaacaaaaactaagctaataaaaattctttaagcagaagttctgctggaatatactttaataagtgtaaaaatatataatatgtgcacattaagtgctttttaaagattgcctaaaaagagaatttcctttagagtttctatataattaactaaattggtacattaaaaaaattgcaatttcacaaagtctgtgttagtggattaagatcaatgaggttttatgcctgatgctcccttgctgttacagggcttgctaatttgcctaacagatacggtctctgtggcgcggcgatggcatttcaaacataggttaaaattaagagtaataggagtaattaccttttttttcaagtttgtgccttaggtccatgaaatcataagtttattttaccttcttaaattcagataagccaactatttctctgtttgtttttcttttcaaaaatcttgtcttctcaaagaaatataaagagaattgcctacattatattcagggtctaagatctggggtcttcattttctcaccacatccttaacaaaaccaccaccaagcacctccctatttccccaaaacaaaacttttatgggcatttaggaggtttctaggttctgtccaatagaaccttctgcaatgatggaaatgttctacatctgctttgtctaatacagtagctcttgccacttgtggctattgagcatttgaaatatgactgatgataaatggaattttttatttcaattaattttaatattaatagccacatgtggctactggccaccgtattggatagtcatactagctacactgtttcaagacagtgtacttaagaaatagaattctgtatacgcttaagactgtcccttcccccttcctctccccttcatctctcccatcctctgtctatcctcccttaaacctgcactaagtacctaccacctgcgggcactgtgtttggcactggggagcagagactaaatacagcctctttaggaatcagcaaagaaaaaccaaaaccaactctaggaaccagcaaaagttgggaagacagtgacaagttgtaggagaacaggtatgcagtcagtgcccagtgaaaaaatatattcatatctcgggtatctatttttgcccaatcctatttttcttgtatgctaaaactcaccaaaatattaatcaaaagtagcccagtaaggtttatcaaaaaaatttaatgaaagattgatgactttgagatcctaaaaatgtagagtgagagaagtcatgaggaaacagagaaatgggaacaagaggaactgggggttagtcggggataagtggatggggaggctccagctaggggcattacttggtggccttaaatgggttaggatggtgaaggccagggaggagctgctacaggaaggattcagggcatgaggatgggagaacctagagaacggcataagtacctaggtcccagtttgtcttggcctaagaattatgcctggaaacctaggcaggaaggatctcagcttttttatttacatagttgccaacagagggttctgggttggacccagaataaaggggaaacaagagattaagaggctaacgatatgttggccagccaggctgatggaagcccaggtcatgttcatgattgtctctggaatgtactgggctctccaactgtgattaatgctatatatagtgtctgtcccagtcttgcagtgctgtccttgatcctacactccaatgtatgtctgagtgtgacattactaatgagtcatctacgaagagggcagatgaactgttctgccttgggcacatattaggaatgagggaataaaaaggaacaatctgaattccagtgactaagttaaagaaggcacttccagaacttgaacagtggcagtgaaagaagcggggagtctaagacaacagatgtcctgttggagggttgctaggcacttagggttctagctgtcattcgcttattctattactgcgttcatttattcatttatatctgttcaagacctttaatattcattccagagactgtgctaggtactgtggacacagtagggaagaagacttatgatgcagtggggcagaaggatgttaaataattataaaaagtacaataattgatttatgtttctgacatatgctgtgaagaagagttacaaggtgcattatataggaaactgacataacttggaaatcagggtggcattttctgaagatgtgatgcattagctgaagagttatgcaggacagggtgggaaagaagagcattttaggcagagggaacaatacactgtactcttccttcctggcaccttttgcacctggcattatgtagccatttatttaattactggttgattctctgtctccccatccagactacccactccaagaggtcaggggatgtattggacttggttactgcaacatgttcagtgtccatcctagtgcctggcacatgtgaggtctcagttagaacctattgaatgtacatgtgtggaagctcagaaggaatttggagcatttgagagtctaaaaggaggtcattgttggtgagcacagagtggggggttgagaggttcaaaataggatggaaaagttaccctgggccttgtgagccacatgaaggatttggggctctatttagggcaatgggaaatgaccaaaaggtgttaaataaaaagtgatgagatcagatttgtagtttaaaaataacattctggctgctgtatgaagagtaggttggaagggagcaggagtgggcacaggaagatcatttgggttgcttatgtagtggtccagcaaaaacatgatggcatctttgactaggaagatgaaaagagatggacggactcaagaggttagctaaaaagacaactgcagactaggcacgatggctcacgcctgtaatctcagcattttgggaggctgaggcgggtggatcacctgaggtcaggagttcgagaccagcctgaccaacatggtgaaaccccatctctactaaaaatacaaaaattagccaggcatggtggcatgcacctgtagtcccagctactccagaggctgaggcaggagaattgcttgaatctgggagggggaggttgcagtgagctgagaccatgccactacactccaacctgggtgacggagcgagactctgtatccaaaaaaaaaaaaaaggacaattgcaaaatggtcaaaggatctgagtagacatttcttcaaagaaactatgcaaatggccaatgagcacaaggaaagatgctcaacatcattaaccatcagggaaatgcaattcaaaaccacagtgagctatcacttcataaccactggatgggtagaactgaaacgacagattataatgagtgttggtgaggacatgggaaaattggaaccctcaaacactgctggtgagaatgtataatgatggagccactttggaaagccatctggcagtgcctcaaaatgttcaacattgagttaccatatgactcagcaattctgctcctaggtatacactcaagagaaatgaaaacagatgtctacacaagcagctgtacacaaacagatgtctacacaagcagttgtacacaagtgttcatagctacattatttataatagccaaaaatggtaacaatctaaatgtccatcaactgaaaaatggacgataaaatatggtatagctatacagtgagatattataagcaataaaaaggaataaagtattgatacatgctacaacatggattgaccttgaaaatacatgaagtggaagaagccaggcacaaaagaccacatattgtatgatttcatgtatatgaaatgtccagaataggcaaatctatagaggcagaaagtagattaataaaaaggcagaatagaaggagaaaatgacagaagtgagaaggacacaggaaggggggatgaaaaaccataaaagggaaaatttaactaataaatctgaatatttttcaagtttgttttcaggaacctggcaaagtggttccctatatggagcctctagtttgggcacagaaaattgaggttttgagaaaatccccttaatagctataggttgcttatttaaaccactgtccagtggaggaaacaattttgagccttctagaagcacttacactttaaagaccctcctgtctgctgtgtcattaggggaccagcatggcagccatcagattaatttaatagacttttatgtagcatttatcagcatccgtatagcagcgatatcatacagaaatgccagcaggggatgtacaaagcctgtaactagtgagagtgagatcagtggggagcatgagggagctgaaggcccctgattcatgttaaataataacatcttccctggggtcacaacgccaccgcagatgagagggtctttaaagtttaactgccctcactggagaagctggcagttttatccccagggcaagccatcagagaggggacaaagcagtgttaggcaggctcatggattaaaaagaaatgtctttctatgagtggcatgtgtaatatgtggattttggttaatcccttttctgtcctgaggcctggagatgctctgtgatgtttatgtgacccgaggaagggatggggaagcaacaggggctcctggagtggagcagtaggatctgagattgccaggatttcaatttaaaaggagaccaggctccagaggccagagacatctgtgaaaggagaggaaaggcaggaaggagtcagtgaaaagcgagtgaggctgagttaggatgggatggccagcaacaggagttagaggtggaaggtgtgaagctttctggatggaagctggttggacaggggcctttggagcttcaggaattacctggcaaaagttgagactcggaaatagctcaggtctggagaacaaaacagaagggacctgttacctcggcagccacagaatcattggttcttgaggatatctcagaggtcatctggttaaaccctaggtctacagaggtgacacatccctgagctgttaggggcatgaatcccctagtccaagtcccaactctggcaaacatgaaggtgaatgggatctcccaggaagcaggttttctggcctcagcaattctgtagcgagagacaagcgaagcaccatggtggcccagtactaactccctactcaccgttcggaaaggatctggggctcagtgtccctaaaagcctacgctccattcacgtctgagatgtcagaaacacagcactcaaagggaaatgaaaattcaagatatgctggaaggaaaataaatttctcaaataaggcccagtgcctaagactaccaccactgcacatttccaacaaggccttgctcagcgtggagatgtttcctccctaagactgcgtcaccattatgccctgcatggaagaatatctcaactcagcttaaattccagctctgggcctttagtgcagatcctgggaagactaactctgcaattttttttccctcctcagatatccccccaagtctctgctatcatctttgccaacatgacacactaattccaggaacctaattttttccaggaatcgctgagagtgcttttgtttcccaaattttgtgggtaggaagctagtgctataataactatatgtcatattacatctttggattctctaaaaagatggcattatgcgagactttgaggcttgaagaaactgtatccatcccaatgagaggaaggtgagaatcactgcagaaagaacctgaatcccctccctgcccctcacctgagtttttgttttttgaatcaagaactctctaatttcgacttaagaattttgggcttgggactcataagggcaacatcatttgttttaaaaatttgttttctttcgactttcatttacaagaggatttagtccttggatttaaatttctccccaagaatttaataataaagaatcatttttattattggaatatgttcatgttgtcagtaaatctaatttcagaacctctgatgagccgtattggatgatgtattttggtatggaaaacacaagagagagtgaattttcaaccttagattaatgccctatttgagattttgattcatgtgctggttagatctacttgtgaaccttgcggtgggtaaatctgcactttcacctgtagacccaggagggtccccaaaggagcagtgatgggtggttactggggtactgcttcatggaagtggaaacaacactgactcaaggatactgttttcctcaaatagcagccctagctcctctctgccctatgtgagtggtgagtttgggaacaggctcttctctcttgggctccacctgcctgctgagaaggtacactctactatgtatgcacagccacaggtaagtgtggcaaagcaagtcctgtccatgcagaggatactgtgtgccccatcactacccatggctggtggattggttgaattcaaggaagcagagtccactagctggcccacttggtcagacattggggccacatcctctagcatagctttggatcagggatccccatctgtctgactcacgtgtctatcttttgttctcttttctatagaaaaatcatagtgtgtacattgcttgaatgatccttttgggtttggctgttactcacagatgaaggagacatttccaaggttgtaaccagagtcattctaagcacagtccttgcagcagtagagacaatcccaatgactacaggaaatcctcaactctcatccagaacctgtaagctcaggacatgcatcataggaaggatgtgaattgctgaagtgcttccatggtagtcttttgctccctgcctacgtgggcaagaagctgtagactctgggataatttggacgatcccagcacgggtatactccactctgcttcatggcacttaccaaggctggagagagaccacacccatcccttctgttttccattgcattcccttccccaaactttccatccagaaattcttctttggttgaccctgccacattgtatattcttgttctccccccatgatgcattttatttcagtatccttagattcctaataaatcaattatttaaacatagacaatgtctagattaatttcctacacaaaaatacaaatgctagggttcctatgacaccttttacaaggtgtggtctagtcttcttatactctatgttgacagttttcatttcaacaaaaatttaggtgactgcttagtccgtacatctcagtgtttctggcattgtgttaggtgtgggagacagtgaaatgaaagtcacaagcccagttgtcaaagatctcactctcttgagggcaaagagtaagtaaaacaggattagagaacagtacaatgagtgaaagaatggaggtataaaggggttgtaatttgtgtatagaggctaagggggagggcattaagcttagggaagacagtgcaccctacctggtccagtgggttgtattacatgcaaatgatcaagtttcactgcatattcgattttcacatttcacgtatgtcatgattttatacatactgcaatattcagaacccaatatcttgctattggatttgctgagaatataacaaaagcctacaggaaagagacgtttttgaagcagctcccctggtgtctttggttttctttccgcagacacatagtggccagtgactgcaggtgtgaggaacctcatcagctgcaaagagtagagaaactccttccactttcctctaggaatggtggtgcaaatggttgttatcaacatagtgggaaacattgcaaccaatgcttctcatgctttaacatgcaaatgaatgacttggggatttgtcaaaggcaggttctgattctagtaagtctgagattctgagattctgcacttctaacaagctttcaagagatgctgatgctgctggtccttagatcacactttgggtagcaatagttgaagcatgtgtaaactaataggatgcatatatacaattttcctgtttccttggataactgccctgtggggctttatgttctgatcatcaggactcccttctgaatgccagaagccttcctgaaataggctttaggtgctctcagcctttatagggaatgaccaaggatggccaatcaagcaccccttccttctcccaagactcaccatgttccctgtgtcattcatggggtgcctacaggagctgccactttctaaaatatcactaatgttatctcctatgcagatgaggaaactgaggcacagagtgacagtttctcaccaggctaggatttgaacccaagtagtctggatccagagcccaatactgtgcttttctgcctttcaactataatgctctgatcacagatgactcacccacccaagggttgacccctgctttaaagaaaacaaaaggccaagcatggtggctcatgcctgtaattccagcacttcaggaggctgaggccttgggtggatcacctgaggtcaggagtttgagatcagcctggccaacgtggtgaaaccccatctcaactaaaaatacaaaaattagccagacatgatggcaggtgccggtagtcccagctactcgggaggctgaggtgggagaatcacttgatcaccgggaggtggaggttgcagtgagccaagattgcgccactggattccagcctgggtgacaaagagagactctgtctcaaaaagaaaagaaaagaaaagaaaacaaagaaagaagttatattgagccctgtggaagggtgttacctttcctctgagacctgagttctttctcatttcttcttctttttttacaatctggaactaaaccagttaaaacattctcacacacaaacttgaaatcaatttaatattacatttattttcttctatccctaaagaactctttaatccttcaaagtaaaaagaaggaattggaaaaaacaactgtattagcctgccctggctcccataacaaaataccacagactgaatgactcaaacaatagaaatgtattttctcactgttctggaggctgaaatctgagatcagggtgcaggcatggctggtttctgatgagggctcactttctggcttatagatggccgccttctgtgtccttacatggcagagagagaaagagagcaagagagagagaaagctctgatatctctcctcctaaaggcactaatcccatcatgaggaccccacccttattacttatttaaacctagttatctcccaaaggcctcatttccaaatgtcattgctttgggggttggggtttcagttttagagagacaaaattcagtctgtagtaacaacccagggatggtcattcttctgtatgctctgggtccagaaaagcttgtcctcttcagagcagtcactgtgtctcagagcaggacagaaacagtgtggggagtggcacgtgtgacaagggacacctcacaggaccttactggaaagtcccatgggctctaagatgtgagttgagggtggagtgggcagcatgtatctgtggtaggggcgagaatatactttctactagttttacaagtggagaacaattatttggagtgggcatctggaggcatatcttcctgcctcccagattccatcttctcagcttagtcaaaattaaaataacctagcatgagggaacaagcattctgcaagacagcctacacgagaaatgaatgttttcttaatcaactttgctgaaaggaagaattgagattggcataaaaagctggatttggtgagacaattagaaaatgaggaattggagtttttctacatgtattttgcacaaaattgagggtgggcaggggatctcttccaccatgtttccctagaaactcagagtttggaaatagtgccctacagctctgatctcacctgggccagtgggtatcttccccaggagtttctgggtttgggatgagaaagatgggagagtctttctagtgacagaaaccataagatgaaaaagtttgggctgttggcagccatgtctgcaagacttcagacagatggattgaatggagaagaaggggttagagatggaggttcagaatggcctgaattatgcctcgcccctgcctcccaccccacctaaaaaatttatgtttaagtcctaacacccaggacttcagaatgtgactatatttggagacagggtctccaaagggttaatcaaagtgaaatgaggtcatcagcgtggaccttcatccaacctgactggtgtcatataagaagaggagattaggacacaaatgcggagaccacatgaagaaacagagaagacggccacttacaaacaaaggagagaggcctcagaagaaaccagtgctgccaacacctttatcttggactttgagcctcgcctctagaacagtgagaaaataagtttgtgttgtttaagtcaccccggtctgtggtatttgcgatggcagccctaccaaactaatatgaccccgatctaagagcttctgaagcctaagcacattcctgttcttggagtccatgagacagctcactagcccagtgataaattcctgatttctccaagcgatttgatgatgcatcacttaaatcacatggctgtcttcttcctgtgtgtcttgatatcatactcccttttacatgtgtgtctctgtgtccagtttcctatttacataaggacacccatcatattgcataacggcccaccctaatgacttaattttgacttgattagctctgtaaagacttcctggctcttccttcctttcttttctttttcttttctttttttttttttgagacaggatatcactctgtagcccaagctggagtgcagtggcgtgatctcggctctctgctacctccacctctggggttcaagtgattctcatgcctcagcctcccaagtagctgggactacaggtgtgcgccaccacacccagctaagtttttgtattttaatagagatgtggtttcaccatgttgcccagggtggtcttgaactcctgagctcaggcaatccacccgctcgacctcccaaagtgctgggattataggcgtgaatcactgtggcaggccctagctcctcttttcttccttcctttccttccctcccctctctccttccctccctctttccttccctccctctctctttctgttccctctttctctctctctctctctctctctcgcacctatgtgtgcccatgtgcacgcataataggatctcatgttgcccaggctggtcacaaactcttgggctcaagtgatccttctgccttagcctcttgggtagctgggactataggcacacactaccgcacctggcttttttttctttttttttggtagagatgggatctggctctgttgaacaggttgatcttgaactcttggcctcaagctatccttctacctctcccaaagtgctgagatcataggtgtgagccactgcatctgtggtactgggggttaggacttccacgtatcttttttggaggtcacaattcaactcataacagtggactcctccttcctggactgactggcttcctggtattttggaaagatggcagtgagactcaagaaagaaaggtctcgatgatgtggcacccagtttgaaagaccacaggctgtgcaggatctgagcagccatatcaacaggttactgagggccaacctatggactgtgatgctttctctgtgcactacaaccccaacccccagatgccctgacaccctggagatttaggacagtggcactaacatggcacatagggcatgcttacctcacaaagaagtgaggtttactgttgaaagttctgagagataattaaaaaggtatgtttcttgtatacttaagcatgtgcaccaagatttctgccactgcacctctgaccagtgcccccgccactaggcctgtcattagtgtctgtacctctctttttgctcccaccttcaacaagccaaatgctgatcatgccagcagttgtttcctagcacatgtttatcactgactgcttgatttttctcccctctaaagttctttttgttcaatactaccagtatcgatattaataaatgttatattaaaaaagcctattgcatttgtgaaagaaacagatggtgaactctcataaataacttgcctggtcattgtatcttctttttatttctcttcttctttccctttttttaaaaaaaatcttttatttgatatatactgcagacagaagcaaagggaaaaaatacgtagaaaagaatatgatttcataatcatagaaggaattgtgttcagagctagagaacatgcagtaattttctatagtgaaaagcaatttccttcaaacataagccataactttttaccctgttcacaataattttgcagtttccacatttccctgggaaaataacccccaatttcctgaccttgcttaaaaagttcagtttgggaaagcagctcctgagttcatccccagtcactggtttatgggaggaagcttcattctgcaagaaataaacagctggaggtgccctaggccctggtctcaaaccccttacatgtctaattggctgtgtgatctcagagaggaaataaacgaagggcttcagttttgctttatctcatcagaaaacactaatgtaaaaaatcaagtatgcattgttctcttcagttgttcctttatcaaatattgagtgcctactatatttgagtttatagctcagctgggaagacaagcaaaaatgtgaaattacaacctagataaatgctaagaaacggaggttaggagtgcatacaaggggaatttgagctagttagggattcagggaagacttatctaaggaaggaccctgcatgctgtcgtcttaaagactgaaagatggggtgcagactggtgtgtgatgggctggaaggtagatagggccagcatgtgcccatgcagagctttccagaccgtggtaaatatttggtctttattccaaagcagtgactggggagcatgttttatgtgtgtgtgtgggagggcaggggtgcgattgttcatccacatcaagtccctggtgacagatgtcatgataaaaagtgagtctcagccaggcactgtggctcatgcttgtaatcccaacacgttgagaggctgaagcaagcagatcacttgagccgaggagtttcagaccagcctgggcaagatgatgaaaccccgtctctgcaaataatacaattagctggaagtggtggcatgcgcctgttgttccaggtactcaggaagctgaggtgggaggattgcttgagcccaggatgtcgaggctgcagtgagcagagatcacaccactgcactccagcctgggcaacagagtgagactctgtctcaaaaaaaaaaaaaaaaaaaaaaaaaaaaaaaaagaagaaagaaaaaagcaaatctgtataattctttgagaagttaatgttaaagacagtttttggtttatcagatccttgggtatgttatttggttcacaatgcatccacagagaaccagagctgaattctaattagtatataagccatctgtagccacaagattgtaaaggatgatacaatatttattaaaaatattgatagacaactagttagtcatgtagattagctggaaggatgcatatcaaaatgttgttaagggatttgttggtgacttttgattttcttttttggtacattttatatttttcaagttttctggaagtaatttttttaagaactccctaaaaatataactgagtgtcagaggcaccaggcatgcatgccctttttatttgggaattgaacagtatgggatcaggttactgtgaggcaggggcttcaaaagaataaaaaacactggtgtgctatagaccaaattatgtcttccccaaattcatgtacggatgccttaactcccagtatggctatatttggagtaagtaagtaattaaagataaataaactcataaaggtggagccgtgatgtgataggtttagtgtccttataagagacaccagagagctctttctctttctccccaccatgtgaggttgcatgaggaggcaccatccatgaacccaaaagcaggccctcagtagaaacccaattagctagcaccttgatcttgaacttcccagcctccagaactgtgagaaataaatgtctgttgtttaagctacacagtctaaggcatttttaaaaagcagcccaacagactaagatgggtggttaaattccatggccacagtttttctgaaaagatgccacagaaaaggagaaatgtacgctgcatcttgttcaattttattacatttcatgttctttttgtgatgaaaaaaaatgctaccatctaacgcctaccaaaaaaatcaacagatcctcacaagaagcatttgaagtatgggagcatgtctaaatgtacatttatgtgcatgtaatgcttggagagacataaacaccggccccaaataaaatctgagccaagttttatccacagagaccgaaacaggatttttgcactgtgctgtctgctgaagggtctacaggcttctgagagtcagagaacttctttgttctatgagaagagcaacattacaggggcttcagagatgggaggaggctcttccccaggcagaagcaaagagtctcaggggaagggatgttaaagctgcgttctgaggtatggataggagttcaccgagtgggtgaggagagagaaagttctcttgtgagtttatgagagcaggaaccaggtcttctttttctctgtgcctggtacctccgtggtgctttgtggagtgtatgaatagaggagcgcagaggtcagatgaagcagtatgtagaaaggtcctggggccagaagcagtgtgagatgtttgaaagattctaaactgtctgatattgtttgtgtatgtgtggggcatgggagcagggtggggtagtgaggaggggcgagaggatggctggagtagagggaagtggagcacaaaggaggtaaggatggagagataaacaggggtgggatcatgcagggcctgtatactgcgcttggaagtccagactcggctgtgtgggcaatggcatcgtagatttgccagcaggtggcagaatcagagtggtaagtgggtcttcagatcttagacatgcttcctccatttccttccaacgtagttctctttatctatcatgtaacttcgcagggagatgtctggccttagaggtctggggtcactgccaggcatggggatgcacctgggtgagttttccaaccctccccactaccctgtcctcaggcagagctgtagaggggcaggccatcttctctttcctttttaattctgtcattctcccacacacccagaatccccgctgctcattttcctgaaaccgtggagctcctctccgagtggcatgtaccaatttagggtttgctgggtaggaaactgtacaaactctgaggtgggcctgaggcaaggtgaagggagattgtgtagagcatagcctggaggaggagctgggatccctgtctccctggagccggtggaggatgctgaagaatggaatctgaagatgccctgagaatgtttggggatcatgagaagtttatgagctccacacatctccagcaaagagcaacacagaagatgggcttttgtgtgttaggcaaagaggatggcaggaggccaggaggctgttctgaaggatggcagtaccctgaagactcatcacatacattggatgtgtaatgttacctccctatctctgtgccatacacacccccaaacctccaatacaccaggtgtgatcccatagccagctcctcccttcaccttctgatgccagactggcagaaacagtagtaggaggctccccaccataaggaacccaactggagtgaaaaaccccagccccactgctaggctatcaggtgcccgtgcaaaccagacagatacccctgccttgagccattctgtagccacctgctgcaaacaacctgcatcaccacttttacctatccccagtgctccccagctgtgttagtcttactttgcaagtcctctgtccaaaagagactctctcagaggatcatcctgtagacagagagatccaagattaaaatacatttttaaagggcattgtcaagactacatggagagaaattgcatgaaagacaaaaaaaaaaaagcccaaatcaaagatgcagttgccactggctctctgtctctgtcagacaggtaaccgaatctcacaatgaggcccccggatgcatccatgggacacactctgtacgtgccacagatggttctcacttcatacatatttcatctgtttgagtgtatgtggtttggggcaaataaaagcaaagcgatttttgtgtctccagctctgccttcaatatttagagattgtatttccaccagagcctctgagatgtaagtaaatgcaaacgatccccgccaacgagtgtttgagctctctgtggagaggggggctcaaggttgtagattcccattagcgaattggcatctcatcctctcttctccccaatgggccctcgtatgaagctgaaatgccaagttatttcctcagagaaatgtttccctcacatagagtcacacgtcctcaactgtaaccgactatctctctgccagcctccgtctatggtaactgacatcagatgagcacatcacatgcaaaagtgctggtgccataaatctttcaaaagattaaagggaggcagagaatcaggcaccaaagcagggaatagaaagtatggtgaatgacaaagacaaaggctgttgtgattttctgtaagattaagaaactatcagaaatgaccagaagtcctgtaatctgcctgggcctatcccatgcagatctgctgacagtgcttatcagtgccttctggtctccctaggagatttttaaaaaagaagtcgaatagaaatagtcattgcaaatatctttatttccaaatatatctcctctgaacatgtcagatctcattctgccacctcattgcttaaaaacctctgatggttctcagtgttcacagaaaaaaaaacacaaattttttagcatgcaagtcctttacctaacatctcatcatactttcctgggctccttgtcagctgctcacttgtgtgtgaattatatttgaccacttgggactctcatgtattttaataccacatgtcttcgcttatgctgttcctctgctggaatgctgttccatgcattctgtgcctggcctcctctgacccattcttcacatccagacccctctaggagaaaccactgcaggagaactcatgcttgcctatgcatgttacaaaagtctttatcaattcctctattataacattgttagacaacattgttactgtttgcccacacttctctcctttgctggactctgagttccagtcttgatatctgaccatattcatcaaagccctggcacatagcaggggctcagtgagcatttgctggactgaatggaatggaatgttaaagaagagacataacatcaaatccataagtgatggataagacccaatggtatgttctgacaagatttagaataggcctatatagtgtattagtctgttttcacattgctaataaagacatacctgagagtgcgttatatatttatttatttatttattttatttccataggttattggggaataggtggtgtttggttaaatgagttagttctttagtggtgatttgtgagatcttggtgcacccatcacccaagcagtatacattgcaccctatttatactgttttatccctcacccccttcccaccctttccccaaatccccaaagtccattgtgtcattcttacgtctttggatcctgtagcttagctcccacttatgagtgagaatatatgatgtttggttttccattcctgagttacttcacttagaatggtagtctccagtctcacccagatcactgtgaatgccatgaattcatttatttttatggttgagtagtattccatcatatatatatatgatgaaatacatatgtgatgaaatatatatatgatgatatatatatatactgtgatatatatgtgtgtgtgtgtgtatatatatatataacagtttcttcatccacttgttgattgatgggcgtttggtttgactccatgtttttgcaattgcaaattgtgctgctataaacatgtgtgtgcaagtatcttttttgtataatgacttcttttcctccgggtagatacccagtagtgggattgctggatcaaatagttgttctacttttagttatttaaggaatctccacactgttttccatagtgattgtactagtttacattcctaccagcagtgtagaagtgttccctgttcaccacatccatgccagcatctactattttttcattttttgattatggccattcttgcaggagtaaggtagtattgaattgcggttttgatttgcatttcccttatcattagtgatgctaagcattctttcatgtttgttggccatttgtatatctccttttgagaattctctattcatgttcttagcccactttttgatgggattgtttttatcttgctgatttgtttgagttccttgtagattctggatattagtcctttgtcagatgtatagattgtgaagattttctcccagtctgtgtgcgggttgtctgtttactctgctgactgttacttttgcagtgcaaaagctctttagtttaattaagtcctagctatttatctttgtttttatcacatttgcttttgggttcttggtcatgaaatccttgcctaagccaaagtctagaaggggttttccagtgttagcttctagaatttttatagtttcaggtcttagatttaagtccttaatccatcttgagttgatttttatataaggtgagggatgaggattcagtttcattcttctacacgtggcttgacaattatcccagcaccatttgttgaaaagggtgtcctttccccactttatatttttgtttactttgtcgaagatcagttggctataagtaattggatttatttctaggttctctattctgttccattgttctatgtgcctatttttgtaccagtaccatgctgttttggtgactatggtcttatagtatagtttgaaatcaggtagtgtgatgcctccagatttgttctttttgcttactgagattgggtaatttataaaggaaaggggtttaactgactcacagttccacatggctggggaggcctcacaatcatggcagaaggcaaataaggagcaaagtcatgtcttacatggtggcaggcaagagagcatttgcaggggaattcccttttgtaaagccatcagatcttgtgagagttattcactatcatgagaatagcacaggaaaaacccacccccatgattcaattacctctcaccaggtccctcccacaacacatggggattattacaattcgagatgagatttgtgtggggacacagagccaaaccgtataatatagttataagtaactctgaagaagaaactgtagaattcttagggtataaaacctacactgttttacttgactacttacttgtgttgtttattaatttaacagttgcttatttaaggcctaatatgtgctaggcattgttctagacaccagggattcagcagcaaactgaatagataaaaattcctgctgtcatggaacttatattttagaaggcagagtgtagtggttacagtgggctctgagttcaattcctagtttcatcacttactaactgtgtgaccttgggaaaattacttacccttcctgtgcttcagtttcctcatttgtaaaatggagattaaaaatagtccctacttcatagggctatttgaacaataaatacgttaaacacttagaataatggctggcacatagcacacactgaacaaattttggctattattatctaatagtttattttacagctgagaaaacagaggtacagacttcacatttagctgttgttcttatctctcactcaggttgtccccagaagtaatgagcttgtaaactcctgtctgcaggcgcctctttccttgtgcgtgtgttccacctggaactccaccctccattcactccttctcctccctgcctgtctcacccgtgccttgattgacacttacttgtccttaatatctcagcctagaatcattctgtttgggaaacccaaggatatagaaattggaatgacttaaaggtggggtttactgcagattggccatctagataaattgacaccatatttagagctgaattattcaggtgagttcttcaccatgcattaaccttattggtcaccttcatgttctctagatctagccagagggaaattctgagtagtttcaatcagaatgaaaatcttctctcgacaactcagcacaaggtcttgtcatttactacttgtttttccttgagcaagttatttagtttctccatctcttggttttatcatctgcagaatgggatttagttgcacacagaactgcctcattaagtcatagtgagaattcaatggcagagttatgcaaaacctttagtacagtggctggaagatagtaaacactccataaattataacaattattattatttaacttctattttatacagagtccagttgtggccttgtctaattgcttgactccatgggatggtattcattggcaacttgagcaggagaaagcagtgcaacaaataccctccttaatattaatagcccctttaacttctctaaaagacttcaaaacaaacaaatcaactgcattctaaccccaattcctttcttcctcccttcaataaacactttcaaggagagtagggatatgatccaggttattctgcaataacaaacactctccaaatctcagcagcgcaaaacatcaaaggtttatttctgttcatgatatgtgcctggggttggcaaggggattctgcccattgaagtccctcagtggccctagggaatgggtggccatcatctgaaatgttgttgttgcccctggccagacggaaaagagctgtggatggtttcaatccagcaatgaggtaagcacttcagcctggagagggcattcaccactctgcccaccacttactgaccacacttgtcgcctgccccacccaggcccaaggaatctggcagtgcaattccaggaagggggagaactgggcatatttgaactaccatggcaaccacaatgcaaagcactgtgccaggcacagtagaagacacgatgatacatacccttccaccttggtcctcaggttacttactatctggctggagagataaggacagcagatggtagaacacagcagatgtgatttctgggcttccagcaggattccttagagtctagaggatgaatggagtgatgaattcccatggccctgctgtgaacactgaaaaaattcattaccaggggtctggcagggactgtaaagatgttatttgggagacgagaaccagggtagtaatagctcatcatttttaaagttctagtgaaggctgtcatcactggccccataatttatttaaacatctatctgtctgtgtgaggggcccagtgaggagcagatggaattcttccctgggagagcctgggaaccagggaggtacatgcacagcagggaggggataagacatgcctgggacacactcacacttgagaggattcgttttcagcatgatccggcctttcaaccacagatgcttattgggcactcattcagtgcaagaaaacagtgaagtcaacatgggaaatacagcaaaacaaagggctggcccaccctcgaggtgcttataagatattaagagagataagacagagatgcagggaaaatatcacgatcaaaacatagtaatgatgagtgcctaagtgagtgatttggacacgtcctacagcagctacagaggaaaagcaagctcccctggtaagagaagtccaggagtgaaaaaggaagaggtaaactctttagccctaaaagatgggtaagtttttggttgatggagaaaagggacatcatgggaaatgacgtgtgcaaaggtgtttagaaaggaaaatgaaaagcccaagtagagtttaactagaacagggctttgtataggtgagcggtagttagaaagaaaggttggtggggccgggagcagtggctcatgcctgtaatcccagcactttgggaggccaaggcaggtgaatcatgaggttaggagctagagaccaacctggccaacatggtgaaactcgtctctactaaaaatacaaaaacttagctgggcatgatggcgggtacctgtaatcccagctactcaggaggctgaggcaggagaattgcttgaacttgggaggtggaggttgcagtgagctgagatcatgccactgcactccagccctggcgacagtaaaagactccgtctcaaaaaaaaaaaaaaaaaaagaaaaaaagaaagaaacaaagattggtgggaaacacattgcagaaaaatgtagttcccagtgcagaatttatccaaggggcaataagagcctttgaaaggatgcaaacatttatgaagcactaacaatttaacatttatgaagcactaaccatttaacatttatgaagcactaaccatttaagggccaatgttagacaccttacatatattagcatattttagcttcttcccaactctcagaggttagcagaaataaccctatttatagaagaggaaattgaggctcacaggtcatctggtaataagggaaagagctgaaattcagacccaggactatctggtgttaaagctgtgcctcttctgtcacaccacactgactgtccacaaagactgtgggttggaacatgacacagttatacaacacattaagaagatcaagcaaactgtggcatagagaagagagactgctgatggggagtttgacaaggaggtgattgtgaaagtccaggttttggtaaggacttgaattgagatgatgatgcaggaaatgagtatgaccacgaacaataggggagtcataagaaattgccaaattgggaggaaagatggtgcctttgattatggacacagttagtttgaagaagacagatagccaggttattatttggcagtaggaaagcagattagtgaagtgttaatagttagcagcacaggcactgtgcaaccttaggcaagctacctaactgccataaacctcaatttccccttccttagggatctgtgtaaggattacttgaggtaacgcatgcacagtattgaacataaagtttgagaaacaggaagagtgctagattagtgggagtagacattttattggagagagagggcagagcccaggaatgtgccttttccacggttatcttccttggctcggcaggtgttgcctggtgagccctggaaatgctgcctacaacttccatcatacaattgtccgattgatcttgggcttgcccatttgaacagtgcacttgactttcggcacctgcacatccatggtcgggagaggagtctggtctgcctcatggtgtaacgggcatgggattttcgggcttccagaaagaggaagacaccagtacccttcatttcagtccactgtgattatggagctgttaaaacctcttctgtgtatcatcagattacactatcttcacagggagtgactgaatgttctatgcaaagtgagaatttgacagaagagaccctcaaaccacaaccagcatcatcaccacaaggtcacacaaacactccctgttcttatcatacagcaatattatctgatgccagagaatttcataaacaaacttgaatgggcaataaaaggaagcccccacactaggcaggcaatcaaatttttacatcttaaaagccccgatgaattacatacagagtaaccaggtttgtcctcataaaagtcattctgctatcctcaaactcatcataaaaagatctatattaaaaatcagcatgatgatatccataaaagattgaagcaaaaaaaaatgcaatgttgattctcccagggcctaaggcaaccctgtcttcaaggcagagcttccatgaatgtcagcataagtaagggaatccatcaattagttatttcataaagccaaggagtaactgaaaccatatagttgtatatatgtttaactctttggaagctgaagaatgatcaaaacacataggtgaaagttttactgttctgttaatactgtcttaattttggtccaccccaacaccaaacaggtcttacaggattaaattcttaccagcctaaatatttattttatccacacagtcttgaattattttttcaaaataagacattagctgtcttggacatttcttattgccacaatcagctgattttccctcttgcttcctctgtttgttcccttccttaaagccaaagagtttgaatttcttttcccagacctgagagagttcttgtacactggtaaattgacactgaacatggaagacatagaagctaccttcttggcctcaacacgcttaacttaagaagagctgttgggaaagctgtggtgcagcctgtctgtcactggcagggggacagggcatggcatcatgggatatggtttccagggtcatgcaaacaagcatggtagaaatgataacaccatggggcctgagcaaaagcctcagccttatggaatattccttgtggcacatgggccagaacgtgctatttcatggcaggtgaagacattggggcctaaagacttacaatgatctgtgaaatatcaaagctcaacttcttaaagtcttcattccgtaatctataaaaggggggcaacaaaataaggatgaaatgagattacctggaaagctatggacttcttttcatgttcaaccattgcctagccctgcctccctctctgaacagtggtgaagacacatttctatcccagtcccatccccttctctccggagtccttcagtgctgctcaccacttctcctgcacctcctctcacttctcctccaagaagctgcagtgaggaaggtgtccatgtggcagagtttgggttgagactcagccaatgatactagactgaacccactggcccctgccagggcctctctataatcatgggagttctgggctacctgcacaaagaggatggcattcaggggaggaaggaggcatggccgtgcctggacaccttctcagtgctcacctggaggagaaggcctcctcagcgttcccctccccaccacccatctttgttgcacactctcctttaaaaccagaagccctccgtctttcttcctcaagcaggggaagtggcctggcaaggataagaatgaggttctgagtcaggggaggctgagagcagtggagggaggatgagagttttattccatcaatgttgggggctgactccttcgaagaggaggcctgtgcctcagagccatgggtaaggtcatttatagaaactttggtttctataaacggggtggggtttctggagtggctcatatgtgccacagatcaaagctcacacaattgccaccacttcctggctgacccttgacctctggtttgcaaggccagtgctgcctccccctccttcctgaccagtagcagggacactccctgagggctggtgcctccacactggttacagcctcatctccagcctgcagaaacagggaggactttcagtaatgagaaaccttcacataccctaagtcccaggggacaaggtgggagacccctcttttaaggtccatcttagtttgtggtgataactcagatccagggggagaaacagattggtccattcatccctatccttaccttggcatgggaaaccacaacccacagtgcccaacattggccttggcatgcctcacccttgtctcagctgtctcaggccatatattcttggtcatgcactgggagaccctcccctccaagtatgtctttttttagtttttaattttattagttttgaatcccccaaatggtcttcatcctccaagtatatctgtcaagtgctgccacccaacctctgttggggaaatgacaaacagcaagtttctgccttctgacttgcctacagggccataagcaactccatcatgcttgggttagagtgagtaaaaacagaacaaaatattgggatttgatgttactgaagaaaatctatgtcctggagctgacagatcttgtctgacaactttcccagagggtctttctgggtgtcatcagtgggacctgggcttctaaaactgggtggggagaaactcatattttgtccttgtcatttttccccagagttattgtcacccagacagacaggcagactggaatgaggagagaaggcaagacaaagagagaaaattagtgtgggccaagacgcaggagtttatcattcctgaggcataggatggggctttcttcctcttctgtctctggggtgctttctgcatctctatctccattatctctggcttctggccttcacaacctacgcaagcacactctaaagttaagaaaacaaggaaacaagggaaggagataagtaaagaaaaaactacatccataaaagaactgtcattctgggatctgaagagagagtgctaagatagccctagtaattaaacttattttgattggaatttatttatttatgtatccatttcctaagatgttaattagcagcttccaacaaaagatgcagatataagaaaattaaatcatttaattagaattaagtgtgagtctaatatgtacaaagtactgggttgcatggagttcagccttatgcagagagcaggggctttggaataccttttagctgtgtaacttaaaaaagttagttaatctttgagcatcaattcctcttctgtaaaaccgagttaataattgtagaacctacctcacagactcgtgttatgggtttaaataatatatgttgaagtgcttaacatagtctctggcaattcagtgagcacttaatacacagtaagtattactgtgattattcatttctgtgctaagaaagaaaatgatggtggggacattgtccctgttctgaaggagacagagaggtagggaaggacttgatgtgtttggggatgggtacacaggttgctgagtgactagggtgtacacaaggggaagaaggaagccaggctgcacaaggcttaactacgaatttatcctattatcctatgggcaatgagaagccacttggcaatcgagaaagatcactctggtggaggatggatcgaagtaggaagagatgggagccaggaaacagtctgggcctattgaaagacgtgaggtagagagatagaaataaccttcactggggccttggagtggagaggagggcagattccaaggcctctggcttgtgttacttgggtggttccactagaatgtcagctctagggcaggggacttgttttgtatgttgatgtagctccagcacctagaacagtgcctggcacatagtaagagccccataagtatttgttgaatgaatggatggtggtgacattacactaggaaggaaataatacagaacagcaaatctggggatgaagataatacttttattctagatatgctgaatgtaagcagcctaggggatattcaagtgaaaatgtctcatgtagaacatggaaatttgggcctgatactcaggagagaactttgggctggaatagagttgtgaacatattggtctataagatggctgaaatcatgagatggttcagatcaacctgtgaaattgtggaacaagaggagaaagggtagaaaatagagacaggtgaaaatccacatttgtggtgggatttaagaagatgagccaagagatggagaggagataaagagcagttaatacagtagcacggcagggggcggtggctcatgataatctgagcacttttgggaggccgaggcaggtggatcacctgaggtcaggagtttgagaccagcctggccaacatggtgaaaccccgtctctactaaaaatacaaaaattagccaggtgtggtggtgggcgcctgtaatccaagctacccaggaggctgaggcaggagaatcacttgaacctgggagaaggaggttccagtgagccgagatcataccactgcagtccagcctgggtaacagagtgagaaaaaaaaaagactgtagcagacaggctctgcaaggtaacttcaagaaagcagtaatagtactagctgctgcagagggcttgagtagacagagcatcacaaaggcctacttaatgtggcagcgagtgtcacgagacagcctggagaacagtagggatgaaaactttcttgcagcccccatcctcttccatcagaatggctttctgactgttttccactttcttatccaaataattagcaaataatcacatataattctaattaaatgcaaaatcaaataggcacatttatgcaatactgaggagtgactttttcctcaatttgtcatgtttacaataatgtcaccaatttaaacatcaggttaaaaaacagaaatgttcaggttctaatgatatcgttcccttttcctctttgcttccatgtgatattttaggttattcttgtagctattaatagtgctgtaatccacacaatttggaagcagaatatcgccttggaggactttagattgggtgtgcacttccctctatttctatgaaaatttcatgtttcttaaatgtcattttttgaactttagatatgcaaacttaatgtgagactctaaaatgcaatgatttctttttacagccatgatagatttgtttaaatcattggtcagctctgacagttgtattaaaatctttaaaaaaaaatgacagaaaccagaacatgctatctaaagtatacatcctctcctgttgttttggaaagccagtggcacatacttcatatgcaagaccctcattcttgggaccattacatatggatcatcaagtgttggttacgcatttttatataaacttgatcttgcatagctcagctgctttgctgaggcacagtcctgaggaaggttgcttggattctcagtttagcataacatttgagtgatacagcacagtattcctgttcatataaatattttaggttgaaaaaactccttttgttatttttctctctgcctaagaaatactttcatgaactcttcccataacagagcagttctctgacttcagtaaccctgaagacagacaaggaaatagcctcttggcacttctggttttccacaactaaaacattgagaaaatatgcagaaccacaccacttttaggtgactagagagttccttattttctttaaactgtacatcctgtctccttcccagttctgtatgtgggaaaaattaacactggagttagtaaggaagaaggtatatgaccacactattaacctcagagagcctactttggaagtttccaatttccttcccatttgtggttggagtgtgacctgtaatctggattttcatccaataattctttctatgaaggcgtctgtgactaattttgtccacaagttctcttctcttccttccttgtcttcctttctgcagtgtgtgtgtgtgtgtgtgtgtgtgtgtgtgagagagagagagagagagaaagatttatctttttcctttatcctcttatgttttctatttgctcgttcatgtatttgtctcccctcatttctcttgctaacttatagaatactacaaaacaaggattatatctttttcttttgtttttcatttcaaagtacctagccagagatagagtatccaggcataaaagaagtgtttaatcagcactcatggatgaattatgttaggacaaaaaactagatggtaggatctagtgttgcacactttcatcctgaataatgcattttgctcagcaattatcaccccaaccttcattggcgatccgtgaactcaccaaaaatttagtgtgtgtttgtgtgtgtgagaaaatatgtgtgggtgtatggtgtgtgtgtttgcccggtctgcagcctgcatcagattcaaaggggttcaatcctcaagagttcagggaaggagttctctcctttcccttggtgctggcagatgaaaagtgcaaggactcagcactttttttgaaccagtcaaggtcttgcagacatgaggaaatgtacattagaagttttagaggccaggtgtggtggcttacaactgtaatccaagcactttgggaggccgagttgggaggattgcttcaggccaggagtttgagaccatcctggccaacacagccagacccggtctctacaaaaaataaaaaaaattaactgggcatggtggtgcatgcctgtagtcccaattactagggaggctgaggagggaggatcatttgagccgaggaatttgaactttcagtaagcaatgattgcaccacttcactacagcctgggctgcagagtgagaccatgtctcacaaacaaacaagcaaacaaacaaaagccttagggatgagatgggatgggataaggagggctctgagttggccaaagatcaaagtccaatttcacttgaagactctggggcctagttatacacagagaacctctgtggttatcaaatacaactcaagcctgcagtgtgttcggcattggccttcctccaggactttgcctctaacagctatttcagttatgaattctgacaacaatgatttctttaatatattctggccattaatggctgacagtgaggcaaacacttagtaatcaacactatagagtaagaagaagaggagctggaagaagaggagaagaaagagaaagatttaagagaataaagacagtagaatatgaaactggctccgaaatatattaatataaaggattaaggcaattgaatggaaaggctcctaaggtttcataaagggaaaattgttcactaaactggaaatagaaaaaaaaagagtaattttaagtgcacgtttcagataaattatctcacttcgtttagtaccaatatttctaatgaacacttagggctgaaatgaatcatttctctgctgactccattaggaaacctattgggtgtgcaatttgagtgagattacagagagagatgttgagagatcggtgatttagaaggtgggcagctcttctctgataggtttgagtgtcctctaactccatgaagagagggcctgagaagctcagctgcagaggcagcctctggttaagagaggcagcaccggatccttcagagaatggctggctcagaggaaatttacactggtgattcactcattgccatggtaaccacttgaatgcagaggagtacatttgttcatttttacaattattctattatttatactgaggcgtctttgagaggatgatatatatatggggagaagtagttaccccttggacaaaagagacaattaaccacaagatgccccaaattggaaatacatgtttcctaatcaccaggggcacagtctctttccacctagccctcagggaaatcttcaatatccaagaagatgttctgctagccacagaacagggaaatgggaaagtctcacttatcaaactcagttgtcaggagtaggccaacatttcttcttctttaccagatctttttcttttcgattcaggattttctcatagtgcatggtttattatacttaatcacctaaaatatgccactacatgcaaaagtgagatggcttttaaaaaactcacctgagaaaacgtcttgtttgacccggaagacataatggaaaagctaggcttaaaatgtaatgaattttggttttttacaaatctagcaaaataaatgaataaatgagcatggtggtacatacctgtagtcccaattactagggaggctgaggagggaggatcagttgagtccaggaattagatcttgcattgagcaatgattgcaccactgcactctagcctgggctacagagtgagaccgtgtctcacaaacaaacaagcaatcaaacaaaagccttagggatgagacgggatggataaggaggtctcataagcagggaaataaacaaataatcttcccaaacatttaatacttagtgtggataatttgatatactccacatttttgttgccttgattctaaggatttagagtaaaaggtatagaaatgggggaaattcctgcagagaaatagaaagtgagagaaggttccaatcaagtgagcgcagatatattgtccagaatagttctctaaaagaattgattattacataattatatataatcaatatgcataagtgcatatgtaataatttaatacatatgtaaaaggtattgcatatgtaatacataggtactgggactaatttaaacatttcaaaatgcaagatatagtttatacaagcaatggaatacctgcagctatagctggtaagaatgatgatggaggtaaaatttgtttacatgaagtgggggtgcagtgactcacatttgtaatccagcactttgggagactggagcagagaatcgcttgagcccaggaattgaagaccagcctgggcaacatggcaaaactctgtctctacaaaaaattagccgggtgtggtggcatgtgcctgtagtaccagctacttgggaggctgaagtgggaggatcacctgagcctgcagtaagctgtgattaagccattgggtgacaaagtgagaccctgtctcaaaaagagaaaatttttttttacgtgaaataatgcctatgacatactgaggttttaaaaagtaagaaatgaggggaaaaaagagcagattataaacaatatgtatcttataatcacattttgctttaaaatattccatttctttatatatatgtctatctatgtttgtgcttatagagaaagaaaacctagaagtagagtcaccaaagggttaataatcatctctggtgatgggatggtgcataatttttctatttttcttccttcatagactgtgagcagaatacgtatatgatcatagttgtattctatctataatttattaatcatctattatgtgtcaaacactttatcatgttctgttctcctagagcttgtgttttatgactggatatatcagccggcattcttagttgcaaacaacagaaaccatgctgcctaatttaagtagaatgtgatgtattaaaggatggttctctccggaattattccccagaattgttgggagagctggagaaatagattcaaggctaagctttcaagagcaacgccccaaatcacgtcgcagaactgagctgatgaggtagccaccttcactgctattgccgctgccaagtaggaaatgaaaggaattgactagtgtagctcctactgctccagcaccagtgctacttctgagccaaggacttgtatttgtaacccctgccgctcctgaaagctgaactcatcagctgctacctgcatccgcaaagatggaggctgcatgcacatgtgggacccagtgtgcagacagtcagatggttgctagagcctgggtcacatgcctgcctcctagctgccaaagcagctggaatttgggttctgaattctgcattgatgaggctgaattcataatgtgggaatttccctcattagagaagcctatttaaatgataagtggccaggcgccgtggctcacgcctggaatcccagcacttcgggaggtcgaggcgggtggatcacgaggtcaggagttcgagaccagcctgaagaaaatggtgaaaccccgcctgtactaaaaatacaaaaaaacagttagctggacgtggtggcagtcgcctgtaatcccagctactcaggaggctgaggcaggataatcgcttgaacccgggaggcagagattgcagtgagccgagatcgagccactgcactccagcctggacgacagagagagactgcgtctcaaaaaaaaaaaaaaaaaaaaaaaaagataagtgacaacaaggaccggacaaaagtgcttgtaggttattgatagtagagagaacttgttttgaatacatgtaaaggaaacccaatacaaagtaggttaaggaaaagagggaattaatgggctcacaaaaccaaaatgtccaggttcatactggcccctgtcgtaactggatccaggaactcaaatgatgtcatcaggtatcagtctctttctgtcctcaggttcttttgtgtggatagcataatagccccttggcagcctcacacaccaatacaatttcattagcagaaatagagaatttccccagggctcagacaaaaatgcatccataaagggactttgattggttcagtgtgatcacgtgactaaccttgaaccaatcacgtactgggggacctgggtgatatccctggggtgtggtgtcaactccactcctgaaatatgtaattggttccccacaggaaaaaaaaagacatattctggctccaccacatactaattgtatcatcttggacaggtcacaatttctctgagcctcagttttctcatcaataaaatgggaataataagagtgtggcgtcacagggttgttaaaacaaggttaatgtaagaatttatatttgtaaagcacagaaacaaaatctgttatgtaattagtggtatttaagtgtttactgctgtaattatattctgttggtcagaagaaaggagaagaaatgacaggcaagggaaacacatatttctacttcaccctcgatcaggcagttgaaaatgtgagtctagaattttaaaagaggtcttggctagagtctgcggaatgaataagagagtaagtatatgacccctcaagggagaaagtgtggagatggaagatgaatagggtggaacataactaactccataagtggatgaaatttacaatactgatgtttttcacatcataccccagtcaatggaaattcaacttgccagtttaaaacatgctctttttactgtgtcacattcccaccaggagtctaagtcctttcttgagattcttctgaactctataaactttaaggatttttttaaaaaaataacattatttgaccacattgaaattaaatatttcagttcaaatagaacaaactatagataaagttaacagatgggtgacagactggaaataaatgtaataagtgattaattgattgggattagtatctagaatatgagtaactccaaaaataaaaaaagtaaaagatgtgaataggagtagagaattattgattccttatcacagagatacccacaaagaggcccataatgcaatctgtacatggatatttctaaaagtgatgtaatagcacgaatttgtgcacaacctagatattcatcagtaaggttatagatactgtattactgcacagtaaggaaaatctttgaactagatgtacaaacatcaatatgaacagatcctaaaaccacagtgttaggttgaaaaaaaaagatattgaagtcaatgtcttggtaaattagaaatacaatatacataaaataacacaatggatttaacaaggatacgagcatgtttaaaaatataagtatattagagtagatgacttttgggggagaaaggagagaactgaaaagagaaataaatgaaaaaagtcttcctttccattatttcctcagagtgtacatgtgagaatttgtcagatctcgacgtatgtaaaggctgaaaatttgggtgaagtaatgtactttctatttttttagtagtgaatagtttcacgtgtgtgaaacctggaaactctttcacattttgtatgcaattaattagcacatcccttttttcttccttcaaattatatacaaaatctacctacgcctttccacctccattgctatcaccttggttcaattggtggtcttctgttgccttgcctaatgtaattatctcctaagaagttttcctaccaagacacaccaccagctctcctattcctaaacaaatcaccaaaccaaagccaaagtaatcttttaaatacctagttcggattataacactgtttcatctaaaaagccaccagtggttttccatctaaaccatctccatctccaagatgctacatgatctgtcactgccccatctctccaaaacacctcttaagacctcaaatcctacctcagggcctttgcccttgccatttcctctgtctggaaccttaatcccttcttaggtgtcttctcatcagagaagacttccctgaccactctctaaaatagtgaaggcgttcaggaaatgccacccccaaatatgccactttggacttcaaactcagggcacttggggaacagcaaatgccttgaggggcttttctctgaactttgtctgcctcaagacagatccttcaaaaagatctcaattgtcatgagtcccctcccaaggaatctcatcaactagggaagattcaactcgcctcccaggagaggagactgaggattgaccccacacccagatagacttcgtcacaggataccacctgttcttcggagggcctattcatcttttccagaaattatttctgctcccctaagttgcctacatccccaacctctctcccctgtgaagagcgtacgtaagcatctacatctcagtgggttggtggatattcattttttttccctgtgatctccccatgcacatgatacatctttattcttttttcctgctaatctgcctactgccaatttatttcagactcaattaccaaaccgttaaagggtagagggaaagttttcccttccttaagacagaaaaatccccttttctccacccagatctattctttctcctgttttatttttcttcttgacatttatttgttaccagttacctctatcccattagaaagtaagtaccttgaggataggggtgatgttttggtgtctattcaatttttcagtgcactcaataatactagttgagaggataaaacaatgaatgaatgaatgaaacaaggggaaagagagagacataagacaggcagacagagaaagaaagaagagaggaacactctggtggtcccattatgcttgaaggtttttctttgaagtagaaatgattcttgtaacaaatctttcatccttcttcccttgcagacttgctccctggctttctttcaggtttgatgattgaccaagtagcagctgtaatatgggatggaggcatattctgactctgctaagagagggccacctccctgtgatatgggtgacattttgatttattcctccgtaagtcatttttttctgtacatgttcactcctacctgctcatatctactttagaaaaaagaaaaatgggatttaaaaaatgacactttatgagattggcattttcctctgtgatattcttcccccaaacacataacttgagtgtaattgtgagaaaaatattagacaaattccagctgagggatgttctacaaaataccagtagtctttaaaactatcaaggtcatgaaaaacagggaaagtctaagaaactgtcacaatctagagcagcctaaagagacgtgagctttaaatgtaacatgagatgctggatgggatccttgaacagaaaaaggatattaagggaagaatgagaaaatttgaaaaagtgaggacttttgttaatgacatattgattttggttcactaatgataagcgatgtaccacactaacatacagtgctaataatagggaagctgtagggtggggggcagtatgtgggaactctctctacagcatcttcacaattttactgtacatctaatgatgttctaaaataaaaaaattattttaaaatgttgttgttgaaatgtgagtcctcaaatttattagtgccctacatggggggttgggggaaagattgcttctggaggtatgtcatgtttagtagaacatttcatcccaattcagtacccccccttccctttcccgttactgatgagtgaggcaggtagataaagcttgtcgtttctcatgaaggaaatccctgagttgtttaattagctctgtatcagatatagcctgaggatttacatgttttgccatgtttaggtttcagcttggagctcaatcctgttattttaagatttttggccattaactgcaaaggggaagcacgaaaaacacctctgtttttataacagtacgtgtctttacaaaaataatttacatgaacatgagccaagggacaagtcttcgaagtcagcagtcctgtgcagagaaacgtctgtgtggcatttccttattttaaaaaatctttttacatagcctgtttaaagaaggatagtttccctctcatttcctcctctaaaaaataataaacttgaacactgggtcaggtctatttttaaggagccactgatagaaatgaattgcttttgggtttcaactctgagatctaccttccccaaattcttctccagcccacatgcttttttttttttcttttttttctcccttggtgggtgaattctattagggttttcaagtattctttatttaagacggcagatacctttaggtagcttcaagagttattaataaaataattaaaataagagctataagccagacaatttacatgtgaaaaaatggaggccaggatgcctaatttttaaggaggtcatgagggtacagggaaaattgcataaattcaagaaaagggaatgctaattaaggccaatggaaaatggctgcttattatgaaaaacaaatgggaagatgtattgcttgagagtaagagtttcaagaagtaagaaaattgacttattgggaggagctgcagatttacattgcaaaaggagaatatacaggaatagcaaaaattaggcctgttttgtaataagtctaccacaagatacagtaaataaggtgtgtatatattctctaagtatatgttctacatacacatcgcatgttagatcatattgggtatatcgggtgctagatctctctctcatgaaagcattgaacaaatgttataaatgaaacacctctgcactcatcacacaatttaagtgagagaatacttcaatatatttgaatcctctgtattcctccttaatcacatccctcatcctttcactggtggtagtcacttttctaaattttatagttattcgttcctgttttctgtacagttattaccacacaaaaatatatctctgaacaatatattttcagttttgcttgtttttgaatttatataaatggaattagactgaataactatttctgtgatattgcgggatctggccagcagcccacaatgcaacgggtctctctctttgttcccaggtggatcagcaggttgagaaataatagacacacacaagatagtgaaagctggttccaggggggtcactgccttctggtcctgcagtgccagcaatacactggatataccagtatttattattaagtttagtgagggcggggtaggttagtgagggatttagggtcatttgattatgaggtgagatggtcacatggggatgaagtaattctttaacataacatttgtatgtagaagtacagtacatttgtatgtaaaagtacagtatacagagataagaatttacaatatagtgtgtgcatcagtaatttctaacagagccttaaaacagaaacacaatctttccataacctatgattagcaagatgttaatcagcagtaacaattgcaacaaaagctggttacaaacaatccatggaaacaggatgtgaagctaggcaaccggttagaccagaaattctcagaagggagtatgctttaaccctaaagaggcctagaagagctgtggcaagatgagggcgtttataaccctatcttatccatagggacaggcgccccgccccccatgcatccatttataggctctccacaagggtcgcattccattcccagagctatgaacatctgcttttttgggacaggaatcttggtgatgtgaaacctccctgatcgcacatccattcataggctctctgcagggggaagcacatcacatgctgttggctcatcctggcagtccagcctggcgttgtctacacaatcctcatgcaattttgtatttacgataatcaggagcatttcatcttttattccatagcaatagtttcaaggggtcttcctacactgtgactttttgaaactcagaggtataaacatttatatgttatgataagatgttttaaaatgttcatgtttatggcttttaaaaatgatcttattatcagttccacatttagttacttagtaattagaaaagatggcctatatggtactcattttttgaaattgttggtatgttcttagtggtcttttatggaagtaatattcatatatattccctgagagattgaaaagaatttgaattattgaaatgttgaatgcagtgctgtatataggtccattagatcatgcttgttaattatgttactcaaatgttatatagactttctgaactttcttgtctgtctgatctatcaaccattgaaataggtatgtaaaacttttccaatatggttcttttatcattttcttcttgcagttctatcaatttctgtttttcacattttgaagctctattattaggtgcatataagtttagaaccattgtcttttcttaattaaattatattttattatcatgtaatggctcatttttttctccagtaataaattttgctttaaaggctactttatggacattaatgtaactaaaccagatttttttttttttttttttttgagacagagtcttgttctgttggtcaggctggagtgcagtggtgtgatctcggctcactgcaacctctgcctcccaggttcaagcaattctcctgcctcagcctcctgagtagctgggattacagggatgcaccaccacgcctggctaatttttgtatttttagtagagatggtgtttcactatgatggtcaggctggtctctaactcctgaccttatgatccacctgcctcagccacccaaagtgctgggattacaggtgtgagacaccatgcccagccactaaaccagatttttttttttttttgagacatagtcttgctctgtcgcccaggctggagtgcagttgtgtgatctcagctcactgcaagctccgcctcctgggttcccaccattctcccacctcagccttccgagtagctgggactacaggcacctgctgccacatctggctaattttttgtattttttttaatagagacggggtttcaccgtgttagccaggatgatctcgatctcctgacctcatgatctgcccacttcggcctcccaaagtgctgggattacaggcgtgagccaccgtgcctggcctaatccagatttttaaaagttaatatttaactagactatttttttatctttttacctttagcatttctcctttgttatgttctggatatgtctctatgaacaccctaagatacagcttatttttaaagttaatctgatcatctttgccttttaactagaatgtataatttattaatatttaatataattacttttattttgaaatgtattactaccactatattgtgtactttctataggttctgctttttctttttctttttttcttcccacttgtcctcttttgaattaattgagttgcctttttttttttcaattttcccctattttagttggaaatatatgttttatttcaggattattccaaagtttgttgttctcaacttaacaatattgaaaataacttaatatctttatctcctccaaaaaaagaaaagaccttagaatgctttaagccaatttgtccttctgacatatattgtgtattagccagagctctccagagaagcagagctagtagactatttagatctagatttagatctagatatatagataaatagatgagacaggatttattataggaactgactgtggcaatttttgaggttgagaagtaccataatatgccatctgcaaactggagaaccaagaatgctgatagtgtggctcagtctaagcccaaagtcttgagaaacagatgagccagtggtgaaattctcagtccaaagctgaaggtctgagaaactgggggcctgccatcacaagtcctggagtctgaaggccagaggacatggaatcctcatgtccaagggcaagagaagatggttatcccagcttcaggagagagagcaaattcacctttctctctgcacttttatcctcaatccattggatggtgtctccccacagtgggtgagggcagatcttcctcattcaatccactgattcaaatgccagtctcttccagaaacatcctcacctacacacctataaataatgctttaccagctatctggacatcccttaaaccagtcaagttgacaactaaaactaagcaattacaaatggtatttgtgatcagtattttaattccacttttttctgtagaattaatcaaatttacattttacttttaatttaggaatacatttagatgattcaaaattttaaaactgttgaaagatactgtgaatagtctccccattccagctacccaattttcttacttggaggccaccgatgttagtttctcatgtatcattactgagacttcttaggcaggtgaatatatccttttatacaattttattctgttcttttttcctttcctaatgttccaagattttcttttattattattttctttctatttagaggacttcctttaaaccattattttatagtaggtctgctggtgacatggcgacactatctctttgttttacttcatttgagaatatcttgatttcgccttcatattttcacaggtaattcttggttgagcattcttttctttcaggccttgaaaaatgtgccagttccatttggcctccatagttcgtattagaaatgtgctgtaatttattatttttcccttatagtaaggtgtcatttatctcttgctgctttatgattttttttcattgtctttagttttcagaagtttgactatgatgtgtcttcctgtgatttctttgagtttatcctttttggatattaaatatgcaggtttgtactttttgccacatttgggaaattttaaactattatttatctgactactttttagccccaccctctttctcctcccctgggatttctatgacacaaaccctagatcttttgctataatcccacatgtcctggggctttgttcttttttattctttcagtctattttctctttgttgttcagattaagcaattgctacttttgtatcttcaagtttgcttttttgttaatctacatttttgacaatttcagattgccagtttttccaccatccagtttgggatacatgaggcaagaagaaaacctagggctatcaccacggtgctgtccctcaggccccgaggtcactggctgatctgccttcttctctccaccattcagagtcttcttaggtttattttctatataatatccagggtttttaattgtacttagcaggaggaacagggaaaagtccattaactccctcttcaacattattattttgtatagttaatgtctctatatatttacccacatggtgtctttgctcactgttccttcttgcatgtcaaaccatatttctggtatcattatctgaagtatacccttcaaaaagttccttcagttaactgttggtagaaaactttctcattttgattgtatgaaatgacttctcttactctacttttggaaaaaatcattttgtttagtacatccttatatattgacagttacttctctcagcaatttgaaaatatttctctgctgtcctctggctttcaatgctgctgttgattagtcaattgcaatgttacttttcatgtcatacatcctttctctcaaaggatcctttctttgttattgttgatctgtagttttcccatgatgtatccacgtttagatttctttcctcatagcttgttcagcttcctgaatctgagccattaactcagattgttgtatttcatcagttctggagaattcttggccaatatctctttaatattatatcttgtccattttctctattatttccctctcgtactttttaaaaaggtcatttcaccagattcagtgtctggtaagggtccactctcttgttcataggtggtgctttgtggctatttcctcacatggtggaagagggaaggcagccgtcagaggcctcctttataaaggcacaataaatgacacaataacatcaagcagtggtcctcttattagatgcactttagccttctgagtctgccttccaggtatctcaaactctgatatagctcatttctttgtttctctgtgctgctttcttggtgattatttcagatctatcttccagttcactaattctgctgttaattgtatctgatatgacatataatatgtcgactacatctctaattttatttagtatacttttttatttttcaacttcacttttcttcaaacctccctgcacattaaaaagatatctatttaagataaaaaaaacttcaagcatatcaaagtaaaaagaatagtgtagtaaagccctgtgtacccattatccagcttcaacaatgaacaattcatagctaatcttgttttctctgcatcctcacctacttcctttcccactccagataattctgaagcaatcccagacatcatattattttatctgtaatagttcaatatgtatgtctagtagataaggattcccctttaaataaacaatactaccattttcattccccctaaaagtccactgtaatactatttgtaattaacatcaaatagtcttttaaaaatattttatggtttgtcaatcatacttttaatatactcctttatttcttcaaacacattaagcatactaaatttacattttattttattttttttacaatatatttagtccttgtgggcctggtatttttatttgtttttttctgctggctcttgctcatggtagtttgttccctcatgtatttgtgatttttttttttttttttttttttttggtggggagcttatggtcattggaactctgcaggaattctttgagattttggttaatgttcatttccccagagatttgtgattgcttcttccaggtactaggcaccttgggcccacactaacctgtaatcatgagaattcaattctcaggttgtgtttttcaggctatagtgtaaatttcacaccaagtttatgtgactgtcacctattattggtaatacttagaagagcctttattttccttccttacccacagtcaaagctgagagattcaagactgtttatggtctattgcactgatattaattttatttttccaatttgccttcactaaggctgttgccttttgtagaacttgctcttgccttcactaaggctgttgccttttgtagaactgtctctatgcaagggtctcaatttgcataaaccccagacactgtgtcttgtccctctgcacaagcctatactctgtttaaaaactcttaatgatcatgtattggcagatttcctgaagacaagatttagtttcaatgctcagttattgcttggattcatgcctttttactacttttatcctatgagggtttctttcactgtgttctactcagctaaggatttaaaatggtattataaatatttcattcagcattttaagatgttctgtagtaggattcctcagaatatctgctgtgctgccacattcctacaaagaggaaggaatccaaattattatgccttaagtcccacctgatttactgccagaaattagccttcatcacagtgtctcccagctgttcctgagagcttctcattcagggggctatctgatgttgtcttagtttatttgggtgttctaacaaaataccataagctaggtagcttataaacaacagaaatttatttctcatagttctggggctgggaagtttaagatcgagatgacagcagactctgtgttcgggggtgttaacggtgaagggtatacaggttcttggggtttcgaacaaagaattggacaaaatgcacaaacaaagcaaggaaggaatgaagggttttattgaaaatgaaagtacactccacagtgtgggagcgggcctaagcataggggctcaagggccctgttacagagcttttgtgagtttaaataccctctacttggggtacgccctatgtaaaagaagaggatgtagtaaagttacaaagtcatctatggcattcaccctatggagagggcatttcctgttatagctgaagtgtgaattggccttatgtttcctgcctccagatcctattttcctgcctcaatgagggtccgctctcttattcatagatggtgacttctggctatttcctcacatggtggaagagggaaggcagccgttggaggtctcctttataaaagcactaatctcattcatgaggggtctagccacttcccagaggctgcactcctaataccatcacattggtcattagtttcaacatatgaactttccagaggacacaggcatccagaccatagcagattggttctttggttcggatcctctctcctctgttctgtctgtctcatctgaccctcatgcctctgctgctgataactctcattagtttatcattctgcttgacaaagctgtcctttgttggtgaccaccagtgccactagtagttttggcaacagacgttgttctttacttttacttcacgccaaatatgggataggcccttgtcttcgattctctaaagaacagaaggtatgagagagagcattataacacagagatgagcttacaaatacttcccagggccagaactggactcaggacttctggttgacctgcctctctgtatctctcctaccttattgccatgggccagtgggtagtttacttttcaacacccaagttcctctactcactgatgggctttggagtctagactaaaattcgaagtcctaaagaggggaattttcatgctcctttccccaggccaatccccaccttcccagtccctattctctgccaggaatgactgccactcatagtcattgcaggaggatgttttgtgtgtgtgtatgtgtgtgttttcccagaaaagtccagagagatatggctctaacctatgcacccctatctaagacgttaaactagtctgacactagtgcattttttccaggtctaggtctttgagtgttgtgtgtaagactttatcaattcatctcagtttagacttcactgagcctagtccatttctttttctgacatgctatagataacaacttagataataaacatacacgagcctgcccaagaaacacataataccaaagaggcacaaagcagtctaaagctgtatttagaagaaaaactgccctctaagggacaaataatcctcagtgatgcagctgtctttaaaacatctacccaatttacctgactacacagaacactaaatattcaggttacttcactgcatttaggtttttaccaacaatgtgtggtaatatgccttagatttgcataactaagagtctccagagtggtaggtgttccagaaaaacaaatggaaacaataatcagcctcaaaagtcaactcaaatctccacctgggacctccatctctcagacacacacttacaaaccaaaagctgcaactctttgaatagcaattttccagctgctgcattcgtatattttctaataagaatgttcatctactacaccccttacatatctttcttaagctatcataaagcacggtgtcttactcttagtggatacttgttaaatgtaggttgatgtcacacattagtgtgaatgattcttagtgagcatgattcctctctcttcctactgtgctatggaaattagggctttgatgcagggtggggttgaggtttcactgcaatatgtggcacttgagatctttaaatccctgctctgccaaatattgtgtgaccttgggtaacttattttttctaagcttcagtttccttgtaaaaatgttaatatattaaagaattcagcaaagtgtctcaatgaatattaacacttttctctttttgcttctaccacctctcagcctcaacataccagaggccaccctggctccagggatgaccagaagaagatgcagcccagaccattcctgcccatgtttctgagttctaaagattatttgtagttatactgggacatccccagttcagatgtgctacttgctttctttggctccttcaagcatttgtaggctattccctaaagctagaaagggatcaaggaaggctcaagccctattgttacaggaaaggagtcctggtccagaccccaagagagggttcttggatctcacacaagaaagaattcaggatgagttggtaaagtgaaagcaagtttattaagaaagtaaaggaataaagaatggctactccatagacagagcagccccaagggctgctggttgcccatttttatggttacttcttgatgatatgctaaccaaggggtggattatttaggcctcccttttttagaccatatagggtatcttcctgccattgccatggcatttgtaagctgtcatggcactggtgggagtgtagcagtgaggacaaccagaggtcactcttgtcacgatcttggttttggtgggttttagctggcttctttattgcaaactgttttagcagtaaggtcttcatgacctgtatcttgtgctgacctcctgtctcatcctgtgacttagacgccttaacctggcgtctaatctgggaatgcagcccagtaggtctcagccttattttacccagctcttattcaagatggagttgagctggctcacacacctctgacactattaattagtatttttcaaactgttttgactcggtgaatctggaaattagtgaataaccaacactttgaaaaattatatagtataataaaaaatattcatagttagcagaaataatgttttgtgaaacttttgtatgaaatgagtcacattgggtatacaatgtatttcttatgtgaaagttgttagaatccaaacggagtcgctaatgttaaaacaaatagagcctgacaaatagagccagggaaggcaatgaagagagggttctcatgactggtaagaaaaactgtcacaaaagactgcaaaaactacaactttgaacgaaggtcattgcaaccttacacaaaaaacacttctgcaaggttatctactcatcagctgcctgtccagccttggactggcaccactcttgttattgacctctggagccaaggataattatttcaaaacaattatgtgataatcctcctcattttttcctttaatgatctttgtcttcctttacctccctgaatacactttggttcacatagtcccattgcaatactttattcacaaagaaacattgctttctttcttttagagagtctctctttattatttaggttgacacttactgtggattgccatcaaaaaaatctgagagacactacgttcaagagttttgataggtcaggtgttgtggctcgcacctgtattcccagtgctttgggaggccaaggtcggaggatcccttgaggccaagacttcaagaccagcctgggcaacatagcaagaccccatctctaccaaaaaaaaaaaccagatagccatgtatggtggcatgtgttgtagtcctactcaggaggagctatgattacactactgcacttcagtctgggtgacagagcaagtctttaaaataataataataataataataattaataatacaaagaaaagattaaaaagagttcagataacataaaaattgtcttaattatataaaaataaagtaacataaatgaatattctcagataaacaaaaatagcatgccccatttaatagattgattgctctattggccctaattatttactattctgtatgtacatcctatgccacaaaacttgtagtacattcccattctgaccatgcactcagttttgtgacttgatttggccaatgagagattagcaaatgtgatgtgactagaggcttgaaaagcacttgtgaaattaggcttgctgttaactctagtcttttgccatcactgtgaaaacatgtccaggctagcctgctggaggataagaatcacatggtgcagagagaaatggccctcatctcccagccacgattatcctagacctggtgaagatagccaagcaccctagaaaagatcagaagaatcgctcagctgagcccagtccaaattgcccagcctgctaatcatgaattaaaaaaatcttctttttatatgcaatgggggttttgtagttgtttgttatggagcattattgtggcaatagataatttatataccaaataggagatttagccattaataaaattcatgacaataataatcattgtaataaaagatgtatcaattttccaaagaccatctcacttggtaatcttgaaaataacttttcatctttatatttcacattttctgaggcctttactaaggaaagggtttatttagttaatttaatagaagacaaggtggcagaggaagtagatttgctcaaggttactcaacaaggttctgttacctggattcagtctcccaagaattc

SEQ ID NO: 100 - DNA, 124972 bp, Homo sapiens
gaattcttccctgggagagcctgggaaccagggaggtacatgcacagcagggaggggataagacatgcctgggacacactcacacttgagaggattcgttttcagcatgatccggcctttcaaccacagatgcttattgggcactcattcagtgcaagaaaacagtgaagtcaacatgggaaatacagcaaaacaaagggctggcccaccctcgaggtgcttataagatattaagagagataagacagagatgcagggaaaatatcacgatcaaaacatagtaatgatgagtgcctaagtgagtgatttggacacgtcctacagcagctacagaggaaaagcaagctcccctggtaagagaagtccaggagtgaaaaaggaagaggtaaactctttagccctaaaagatgggtaagtttttggttgatggagaaaagggacatcatgggaaatgacgtgtgcaaaggtgtttagaaaggaaaatgaaaagcccaagtagagtttaactagaacagggctttgtataggtgagcggtagttagaaagaaaggttggtggggccgggagcagtggctcatgcctgtaatcccagcactttgggaggccaaggcaggtgaatcatgaggttaggagctagagaccaacctggccaacatggtgaaactcgtctctactaaaaatacaaaaacttagctgggcatgatggcgggtacctgtaatcccagctactcaggaggctgaggcaggagaattgcttgaacttgggaggtggaggttgcagtgagctgagatcatgccactgcactccagccctggcgacagtaaaagactccgtctcaaaaaaaaaaaaaaaaaaagaaaaaaagaaagaaacaaagattggtgggaaacacattgcagaaaaatgtagttcccagtgcagaatttatccaaggggcaataagagcctttgaaaggatgcaaacatttatgaagcactaacaatttaacatttatgaagcactaaccatttaacatttatgaagcactaaccatttaagggccaatgttagacaccttacatatattagcatattttagcttcttcccaactctcagaggttagcagaaataaccctatttatagaagaggaaattgaggctcacaggtcatctggtaataagggaaagagctgaaattcagacccaggactatctggtgttaaagctgtgcctcttctgtcacaccacactgactgtccacaaagactgtgggttggaacatgacacagttatacaacacattaagaagatcaagcaaactgtggcatagagaagagagactgctgatggggagtttgacaaggaggtgattgtgaaagtccaggttttggtaaggacttgaattgagatgatgatgcaggaaatgagtatgaccacgaacaataggggagtcataagaaattgccaaattgggaggaaagatggtgcctttgattatggacacagttagtttgaagaagacagatagccaggttattatttggcagtaggaaagcagattagtgaagtgttaatagttagcagcacaggcactgtgcaaccttaggcaagctacctaactgccataaacctcaatttccccttccttagggatctgtgtaaggattacttgaggtaacgcatgcacagtattgaacataaagtttgagaaacaggaagagtgctagattagtgggagtagacattttattggagagagagggcagagcccaggaatgtgccttttccacggttatcttccttggctcggcaggtgttgcctggtgagccctggaaatgctgcctacaacttccatcatacaattgtccgattgatcttgggcttgcccatttgaacagtgcacttgactttcggcacctgcacatccatggtcgggagaggagtctggtctgcctcatggtgtaacgggcatgggattttcgggcttccagaaagaggaagacaccagtacccttcatttcagtccactgtgattatggagctgttaaaacctcttctgtgtatcatcagattacactatcttcacagggagtgactgaatgttctatgcaaagtgagaatttgacagaagagaccctcaaaccacaaccagcatcatcaccacaaggtcacacaaacactccctgttcttatcatacagcaatattatctgatgccagagaatttcataaacaaacttgaatgggcaataaaaggaagcccccacactaggcaggcaatcaaatttttacatcttaaaagccccgatgaattacatacagagtaaccaggtttgtcctcataaaagtcattctgctatcctcaaactcatcataaaaagatctatattaaaaatcagcatgatgatatccataaaagattgaagcaaaaaaaaatgcaatgttgattctcccagggcctaaggcaaccctgtcttcaaggcagagcttccatgaatgtcagcataagtaagggaatccatcaattagttatttcataaagccaaggagtaactgaaaccatatagttgtatatatgtttaactctttggaagctgaagaatgatcaaaacacataggtgaaagttttactgttctgttaatactgtcttaattttggtccaccccaacaccaaacaggtcttacaggattaaattcttaccagcctaaatatttattttatccacacagtcttgaattattttttcaaaataagacattagctgtcttggacatttcttattgccacaatcagctgattttccctcttgcttcctctgtttgttcccttccttaaagccaaagagtttgaatttcttttcccagacctgagagagttcttgtacactggtaaattgacactgaacatggaagacatagaagctaccttcttggcctcaacacgcttaacttaagaagagctgttgggaaagctgtggtgcagcctgtctgtcactggcagggggacagggcatggcatcatgggatatggtttccagggtcatgcaaacaagcatggtagaaatgataacaccatggggcctgagcaaaagcctcagccttatggaatattccttgtggcacatgggccagaacgtgctatttcatggcaggtgaagacattggggcctaaagacttacaatgatctgtgaaatatcaaagctcaacttcttaaagtcttcattccgtaatctataaaaggggggcaacaaaataaggatgaaatgagattacctggaaagctatggacttcttttcatgttcaaccattgcctagccctgcctccctctctgaacagtggtgaagacacatttctatcccagtcccatccccttctctccggagtccttcagtgctgctcaccacttctcctgcacctcctctcacttctcctccaagaagctgcagtgaggaaggtgtccatgtggcagagtttgggttgagactcagccaatgatactagactgaacccactggcccctgccagggcctctctataatcatgggagttctgggctacctgcacaaagaggatggcattcaggggaggaaggaggcatggccgtgcctggacaccttctcagtgctcacctggaggagaaggcctcctcagcgttcccctccccaccacccatctttgttgcacactctcctttaaaaccagaagccctccgtctttcttcctcaagcaggggaagtggcctggcaaggataagaatgaggttctgagtcaggggaggctgagagcagtggagggaggatgagagttttattccatcaatgttgggggctgactccttcgaagaggaggcctgtgcctcagagccatgggtaaggtcatttatagaaactttggtttctataaacggggtggggtttctggagtggctcatatgtgccacagatcaaagctcacacaattgccaccacttcctggctgacccttgacctctggtttgcaaggccagtgctgcctccccctccttcctgaccagtagcagggacactccctgagggctggtgcctccacactggttacagcctcatctccagcctgcagaaacagggaggactttcagtaatgagaaaccttcacataccctaagtcccaggggacaaggtgggagacccctcttttaaggtccatcttagtttgtggtgataactcagatccagggggagaaacagattggtccattcatccctatccttaccttggcatgggaaaccacaacccacagtgcccaacattggccttggcatgcctcacccttgtctcagctgtctcaggccatatattcttggtcatgcactgggagaccctcccctccaagtatgtctttttttagtttttaattttattagttttgaatcccccaaatggtcttcatcctccaagtatatctgtcaagtgctgccacccaacctctgttggggaaatgacaaacagcaagtttctgccttctgacttgcctacagggccataagcaactccatcatgcttgggttagagtgagtaaaaacagaacaaaatattgggatttgatgttactgaagaaaatctatgtcctggagctgacagatcttgtctgacaactttcccagagggtctttctgggtgtcatcagtgggacctgggcttctaaaactgggtggggagaaactcatattttgtccttgtcatttttccccagagttattgtcacccagacagacaggcagactggaatgaggagagaaggcaagacaaagagagaaaattagtgtgggccaagacgcaggagtttatcattcctgaggcataggatggggctttcttcctcttctgtctctggggtgctttctgcatctctatctccattatctctggcttctggccttcacaacctacgcaagcacactctaaagttaagaaaacaaggaaacaagggaaggagataagtaaagaaaaaactacatccataaaagaactgtcattctgggatctgaagagagagtgctaagatagccctagtaattaaacttattttgattggaatttatttatttatgtatccatttcctaagatgttaattagcagcttccaacaaaagatgcagatataagaaaattaaatcatttaattagaattaagtgtgagtctaatatgtacaaagtactgggttgcatggagttcagccttatgcagagagcaggggctttggaataccttttagctgtgtaacttaaaaaagttagttaatctttgagcatcaattcctcttctgtaaaaccgagttaataattgtagaacctacctcacagactcgtgttatgggtttaaataatatatgttgaagtgcttaacatagtctctggcaattcagtgagcacttaatacacagtaagtattactgtgattattcatttctgtgctaagaaagaaaatgatggtggggacattgtccctgttctgaaggagacagagaggtagggaaggacttgatgtgtttggggatgggtacacaggttgctgagtgactagggtgtacacaaggggaagaaggaagccaggctgcacaaggcttaactacgaatttatcctattatcctatgggcaatgagaagccacttggcaatcgagaaagatcactctggtggaggatggatcgaagtaggaagagatgggagccaggaaacagtctgggcctattgaaagacgtgaggtagagagatagaaataaccttcactggggccttggagtggagaggagggcagattccaaggcctctggcttgtgttacttgggtggttccactagaatgtcagctctagggcaggggacttgttttgtatgttgatgtagctccagcacctagaacagtgcctggcacatagtaagagccccataagtatttgttgaatgaatggatggtggtgacattacactaggaaggaaataatacagaacagcaaatctggggatgaagataatacttttattctagatatgctgaatgtaagcagcctaggggatattcaagtgaaaatgtctcatgtagaacatggaaatttgggcctgatactcaggagagaactttgggctggaatagagttgtgaacatattggtctataagatggctgaaatcatgagatggttcagatcaacctgtgaaattgtggaacaagaggagaaagggtagaaaatagagacaggtgaaaatccacatttgtggtgggatttaagaagatgagccaagagatggagaggagataaagagcagttaatacagtagcacggcagggggcggtggctcatgataatctgagcacttttgggaggccgaggcaggtggatcacctgaggtcaggagtttgagaccagcctggccaacatggtgaaaccccgtctctactaaaaatacaaaaattagccaggtgtggtggtgggcgcctgtaatccaagctacccaggaggctgaggcaggagaatcacttgaacctgggagaaggaggttccagtgagccgagatcataccactgcagtccagcctgggtaacagagtgagaaaaaaaaaagactgtagcagacaggctctgcaaggtaacttcaagaaagcagtaatagtactagctgctgcagagggcttgagtagacagagcatcacaaaggcctacttaatgtggcagcgagtgtcacgagacagcctggagaacagtagggatgaaaactttcttgcagcccccatcctcttccatcagaatggctttctgactgttttccactttcttatccaaataattagcaaataatcacatataattctaattaaatgcaaaatcaaataggcacatttatgcaatactgaggagtgactttttcctcaatttgtcatgtttacaataatgtcaccaatttaaacatcaggttaaaaaacagaaatgttcaggttctaatgatatcgttcccttttcctctttgcttccatgtgatattttaggttattcttgtagctattaatagtgctgtaatccacacaatttggaagcagaatatcgccttggaggactttagattgggtgtgcacttccctctatttctatgaaaatttcatgtttcttaaatgtcattttttgaactttagatatgcaaacttaatgtgagactctaaaatgcaatgatttctttttacagccatgatagatttgtttaaatcattggtcagctctgacagttgtattaaaatctttaaaaaaaaatgacagaaaccagaacatgctatctaaagtatacatcctctcctgttgttttggaaagccagtggcacatacttcatatgcaagaccctcattcttgggaccattacatatggatcatcaagtgttggttacgcatttttatataaacttgatcttgcatagctcagctgctttgctgaggcacagtcctgaggaaggttgcttggattctcagtttagcataacatttgagtgatacagcacagtattcctgttcatataaatattttaggttgaaaaaactccttttgttatttttctctctgcctaagaaatactttcatgaactcttcccataacagagcagttctctgacttcagtaaccctgaagacagacaaggaaatagcctcttggcacttctggttttccacaactaaaacattgagaaaatatgcagaaccacaccacttttaggtgactagagagttccttattttctttaaactgtacatcctgtctccttcccagttctgtatgtgggaaaaattaacactggagttagtaaggaagaaggtatatgaccacactattaacctcagagagcctactttggaagtttccaatttccttcccatttgtggttggagtgtgacctgtaatctggattttcatccaataattctttctatgaaggcgtctgtgactaattttgtccacaagttctcttctcttccttccttgtcttcctttctgcagtgtgtgtgtgtgtgtgtgtgtgtgtgtgtgagagagagagagagagagaaagatttatctttttcctttatcctcttatgttttctatttgctcgttcatgtatttgtctcccctcatttctcttgctaacttatagaatactacaaaacaaggattatatctttttcttttgtttttcatttcaaagtacctagccagagatagagtatccaggcataaaagaagtgtttaatcagcactcatggatgaattatgttaggacaaaaaactagatggtaggatctagtgttgcacactttcatcctgaataatgcattttgctcagcaattatcaccccaaccttcattggcgatccgtgaactcaccaaaaatttagtgtgtgtttgtgtgtgtgagaaaatatgtgtgggtgtatggtgtgtgtgtttgcccggtctgcagcctgcatcagattcaaaggggttcaatcctcaagagttcagggaaggagttctctcctttcccttggtgctggcagatgaaaagtgcaaggactcagcactttttttgaaccagtcaaggtcttgcagacatgaggaaatgtacattagaagttttagaggccaggtgtggtggcttacaactgtaatccaagcactttgggaggccgagttgggaggattgcttcaggccaggagtttgagaccatcctggccaacacagccagacccggtctctacaaaaaataaaaaaaattaactgggcatggtggtgcatgcctgtagtcccaattactagggaggctgaggagggaggatcatttgagccgaggaatttgaactttcagtaagcaatgattgcaccacttcactacagcctgggctgcagagtgagaccatgtctcacaaacaaacaagcaaacaaacaaaagccttagggatgagatgggatgggataaggagggctctgagttggccaaagatcaaagtccaatttcacttgaagactctggggcctagttatacacagagaacctctgtggttatcaaatacaactcaagcctgcagtgtgttcggcattggccttcctccaggactttgcctctaacagctatttcagttatgaattctgacaacaatgatttctttaatatattctggccattaatggctgacagtgaggcaaacacttagtaatcaacactatagagtaagaagaagaggagctggaagaagaggagaagaaagagaaagatttaagagaataaagacagtagaatatgaaactggctccgaaatatattaatataaaggattaaggcaattgaatggaaaggctcctaaggtttcataaagggaaaattgttcactaaactggaaatagaaaaaaaaagagtaattttaagtgcacgtttcagataaattatctcacttcgtttagtaccaatatttctaatgaacacttagggctgaaatgaatcatttctctgctgactccattaggaaacctattgggtgtgcaatttgagtgagattacagagagagatgttgagagatcggtgatttagaaggtgggcagctcttctctgataggtttgagtgtcctctaactccatgaagagagggcctgagaagctcagctgcagaggcagcctctggttaagagaggcagcaccggatccttcagagaatggctggctcagaggaaatttacactggtgattcactcattgccatggtaaccacttgaatgcagaggagtacatttgttcatttttacaattattctattatttatactgaggcgtctttgagaggatgatatatatatggggagaagtagttaccccttggacaaaagagacaattaaccacaagatgccccaaattggaaatacatgtttcctaatcaccaggggcacagtctctttccacctagccctcagggaaatcttcaatatccaagaagatgttctgctagccacagaacagggaaatgggaaagtctcacttatcaaactcagttgtcaggagtaggccaacatttcttcttctttaccagatctttttcttttcgattcaggattttctcatagtgcatggtttattatacttaatcacctaaaatatgccactacatgcaaaagtgagatggcttttaaaaaactcacctgagaaaacgtcttgtttgacccggaagacataatggaaaagctaggcttaaaatgtaatgaattttggttttttacaaatctagcaaaataaatgaataaatgagcatggtggtacatacctgtagtcccaattactagggaggctgaggagggaggatcagttgagtccaggaattagatcttgcattgagcaatgattgcaccactgcactctagcctgggctacagagtgagaccgtgtctcacaaacaaacaagcaatcaaacaaaagccttagggatgagacgggatggataaggaggtctcataagcagggaaataaacaaataatcttcccaaacatttaatacttagtgtggataatttgatatactccacatttttgttgccttgattctaaggatttagagtaaaaggtatagaaatgggggaaattcctgcagagaaatagaaagtgagagaaggttccaatcaagtgagcgcagatatattgtccagaatagttctctaaaagaattgattattacataattatatataatcaatatgcataagtgcatatgtaataatttaatacatatgtaaaaggtattgcatatgtaatacataggtactgggactaatttaaacatttcaaaatgcaagatatagtttatacaagcaatggaatacctgcagctatagctggtaagaatgatgatggaggtaaaatttgtttacatgaagtgggggtgcagtgactcacatttgtaatccagcactttgggagactggagcagagaatcgcttgagcccaggaattgaagaccagcctgggcaacatggcaaaactctgtctctacaaaaaattagccgggtgtggtggcatgtgcctgtagtaccagctacttgggaggctgaagtgggaggatcacctgagcctgcagtaagctgtgattaagccattgggtgacaaagtgagaccctgtctcaaaaagagaaaatttttttttacgtgaaataatgcctatgacatactgaggttttaaaaagtaagaaatgaggggaaaaaagagcagattataaacaatatgtatcttataatcacattttgctttaaaatattccatttctttatatatatgtctatctatgtttgtgcttatagagaaagaaaacctagaagtagagtcaccaaagggttaataatcatctctggtgatgggatggtgcataatttttctatttttcttccttcatagactgtgagcagaatacgtatatgatcatagttgtattctatctataatttattaatcatctattatgtgtcaaacactttatcatgttctgttctcctagagcttgtgttttatgactggatatatcagccggcattcttagttgcaaacaacagaaaccatgctgcctaatttaagtagaatgtgatgtattaaaggatggttctctccggaattattccccagaattgttgggagagctggagaaatagattcaaggctaagctttcaagagcaacgccccaaatcacgtcgcagaactgagctgatgaggtagccaccttcactgctattgccgctgccaagtaggaaatgaaaggaattgactagtgtagctcctactgctccagcaccagtgctacttctgagccaaggacttgtatttgtaacccctgccgctcctgaaagctgaactcatcagctgctacctgcatccgcaaagatggaggctgcatgcacatgtgggacccagtgtgcagacagtcagatggttgctagagcctgggtcacatgcctgcctcctagctgccaaagcagctggaatttgggttctgaattctgcattgatgaggctgaattcataatgtgggaatttccctcattagagaagcctatttaaatgataagtggccaggcgccgtggctcacgcctggaatcccagcacttcgggaggtcgaggcgggtggatcacgaggtcaggagttcgagaccagcctgaagaaaatggtgaaaccccgcctgtactaaaaatacaaaaaaacagttagctggacgtggtggcagtcgcctgtaatcccagctactcaggaggctgaggcaggataatcgcttgaacccgggaggcagagattgcagtgagccgagatcgagccactgcactccagcctggacgacagagagagactgcgtctcaaaaaaaaaaaaaaaaaaaaaaaaagataagtgacaacaaggaccggacaaaagtgcttgtaggttattgatagtagagagaacttgttttgaatacatgtaaaggaaacccaatacaaagtaggttaaggaaaagagggaattaatgggctcacaaaaccaaaatgtccaggttcatactggcccctgtcgtaactggatccaggaactcaaatgatgtcatcaggtatcagtctctttctgtcctcaggttcttttgtgtggatagcataatagccccttggcagcctcacacaccaatacaatttcattagcagaaatagagaatttccccagggctcagacaaaaatgcatccataaagggactttgattggttcagtgtgatcacgtgactaaccttgaaccaatcacgtactgggggacctgggtgatatccctggggtgtggtgtcaactccactcctgaaatatgtaattggttccccacaggaaaaaaaaagacatattctggctccaccacatactaattgtatcatcttggacaggtcacaatttctctgagcctcagttttctcatcaataaaatgggaataataagagtgtggcgtcacagggttgttaaaacaaggttaatgtaagaatttatatttgtaaagcacagaaacaaaatctgttatgtaattagtggtatttaagtgtttactgctgtaattatattctgttggtcagaagaaaggagaagaaatgacaggcaagggaaacacatatttctacttcaccctcgatcaggcagttgaaaatgtgagtctagaattttaaaagaggtcttggctagagtctgcggaatgaataagagagtaagtatatgacccctcaagggagaaagtgtggagatggaagatgaatagggtggaacataactaactccataagtggatgaaatttacaatactgatgtttttcacatcataccccagtcaatggaaattcaacttgccagtttaaaacatgctctttttactgtgtcacattcccaccaggagtctaagtcctttcttgagattcttctgaactctataaactttaaggatttttttaaaaaaataacattatttgaccacattgaaattaaatatttcagttcaaatagaacaaactatagataaagttaacagatgggtgacagactggaaataaatgtaataagtgattaattgattgggattagtatctagaatatgagtaactccaaaaataaaaaaagtaaaagatgtgaataggagtagagaattattgattccttatcacagagatacccacaaagaggcccataatgcaatctgtacatggatatttctaaaagtgatgtaatagcacgaatttgtgcacaacctagatattcatcagtaaggttatagatactgtattactgcacagtaaggaaaatctttgaactagatgtacaaacatcaatatgaacagatcctaaaaccacagtgttaggttgaaaaaaaaagatattgaagtcaatgtcttggtaaattagaaatacaatatacataaaataacacaatggatttaacaaggatacgagcatgtttaaaaatataagtatattagagtagatgacttttgggggagaaaggagagaactgaaaagagaaataaatgaaaaaagtcttcctttccattatttcctcagagtgtacatgtgagaatttgtcagatctcgacgtatgtaaaggctgaaaatttgggtgaagtaatgtactttctatttttttagtagtgaatagtttcacgtgtgtgaaacctggaaactctttcacattttgtatgcaattaattagcacatcccttttttcttccttcaaattatatacaaaatctacctacgcctttccacctccattgctatcaccttggttcaattggtggtcttctgttgccttgcctaatgtaattatctcctaagaagttttcctaccaagacacaccaccagctctcctattcctaaacaaatcaccaaaccaaagccaaagtaatcttttaaatacctagttcggattataacactgtttcatctaaaaagccaccagtggttttccatctaaaccatctccatctccaagatgctacatgatctgtcactgccccatctctccaaaacacctcttaagacctcaaatcctacctcagggcctttgcccttgccatttcctctgtctggaaccttaatcccttcttaggtgtcttctcatcagagaagacttccctgaccactctctaaaatagtgaaggcgttcaggaaatgccacccccaaatatgccactttggacttcaaactcagggcacttggggaacagcaaatgccttgaggggcttttctctgaactttgtctgcctcaagacagatccttcaaaaagatctcaattgtcatgagtcccctcccaaggaatctcatcaactagggaagattcaactcgcctcccaggagaggagactgaggattgaccccacacccagatagacttcgtcacaggataccacctgttcttcggagggcctattcatcttttccagaaattatttctgctcccctaagttgcctacatccccaacctctctcccctgtgaagagcgtacgtaagcatctacatctcagtgggttggtggatattcattttttttccctgtgatctccccatgcacatgatacatctttattcttttttcctgctaatctgcctactgccaatttatttcagactcaattaccaaaccgttaaagggtagagggaaagttttcccttccttaagacagaaaaatccccttttctccacccagatctattctttctcctgttttatttttcttcttgacatttatttgttaccagttacctctatcccattagaaagtaagtaccttgaggataggggtgatgttttggtgtctattcaatttttcagtgcactcaataatactagttgagaggataaaacaatgaatgaatgaatgaaacaaggggaaagagagagacataagacaggcagacagagaaagaaagaagagaggaacactctggtggtcccattatgcttgaaggtttttctttgaagtagaaatgattcttgtaacaaatctttcatccttcttcccttgcagacttgctccctggctttctttcaggtttgatgattgaccaagtagcagctgtaatatgggatggaggcatattctgactctgctaagagagggccacctccctgtgatatgggtgacattttgatttattcctccgtaagtcatttttttctgtacatgttcactcctacctgctcatatctactttagaaaaaagaaaaatgggatttaaaaaatgacactttatgagattggcattttcctctgtgatattcttcccccaaacacataacttgagtgtaattgtgagaaaaatattagacaaattccagctgagggatgttctacaaaataccagtagtctttaaaactatcaaggtcatgaaaaacagggaaagtctaagaaactgtcacaatctagagcagcctaaagagacgtgagctttaaatgtaacatgagatgctggatgggatccttgaacagaaaaaggatattaagggaagaatgagaaaatttgaaaaagtgaggacttttgttaatgacatattgattttggttcactaatgataagcgatgtaccacactaacatacagtgctaataatagggaagctgtagggtggggggcagtatgtgggaactctctctacagcatcttcacaattttactgtacatctaatgatgttctaaaataaaaaaattattttaaaatgttgttgttgaaatgtgagtcctcaaatttattagtgccctacatggggggttgggggaaagattgcttctggaggtatgtcatgtttagtagaacatttcatcccaattcagtacccccccttccctttcccgttactgatgagtgaggcaggtagataaagcttgtcgtttctcatgaaggaaatccctgagttgtttaattagctctgtatcagatatagcctgaggatttacatgttttgccatgtttaggtttcagcttggagctcaatcctgttattttaagatttttggccattaactgcaaaggggaagcacgaaaaacacctctgtttttataacagtacgtgtctttacaaaaataatttacatgaacatgagccaagggacaagtcttcgaagtcagcagtcctgtgcagagaaacgtctgtgtggcatttccttattttaaaaaatctttttacatagcctgtttaaagaaggatagtttccctctcatttcctcctctaaaaaataataaacttgaacactgggtcaggtctatttttaaggagccactgatagaaatgaattgcttttgggtttcaactctgagatctaccttccccaaattcttctccagcccacatgcttttttttttttcttttttttctcccttggtgggtgaattctattagggttttcaagtattctttatttaagacggcagatacctttaggtagcttcaagagttattaataaaataattaaaataagagctataagccagacaatttacatgtgaaaaaatggaggccaggatgcctaatttttaaggaggtcatgagggtacagggaaaattgcataaattcaagaaaagggaatgctaattaaggccaatggaaaatggctgcttattatgaaaaacaaatgggaagatgtattgcttgagagtaagagtttcaagaagtaagaaaattgacttattgggaggagctgcagatttacattgcaaaaggagaatatacaggaatagcaaaaattaggcctgttttgtaataagtctaccacaagatacagtaaataaggtgtgtatatattctctaagtatatgttctacatacacatcgcatgttagatcatattgggtatatcgggtgctagatctctctctcatgaaagcattgaacaaatgttataaatgaaacacctctgcactcatcacacaatttaagtgagagaatacttcaatatatttgaatcctctgtattcctccttaatcacatccctcatcctttcactggtggtagtcacttttctaaattttatagttattcgttcctgttttctgtacagttattaccacacaaaaatatatctctgaacaatatattttcagttttgcttgtttttgaatttatataaatggaattagactgaataactatttctgtgatattgcgggatctggccagcagcccacaatgcaacgggtctctctctttgttcccaggtggatcagcaggttgagaaataatagacacacacaagatagtgaaagctggttccaggggggtcactgccttctggtcctgcagtgccagcaatacactggatataccagtatttattattaagtttagtgagggcggggtaggttagtgagggatttagggtcatttgattatgaggtgagatggtcacatggggatgaagtaattctttaacataacatttgtatgtagaagtacagtacatttgtatgtaaaagtacagtatacagagataagaatttacaatatagtgtgtgcatcagtaatttctaacagagccttaaaacagaaacacaatctttccataacctatgattagcaagatgttaatcagcagtaacaattgcaacaaaagctggttacaaacaatccatggaaacaggatgtgaagctaggcaaccggttagaccagaaattctcagaagggagtatgctttaaccctaaagaggcctagaagagctgtggcaagatgagggcgtttataaccctatcttatccatagggacaggcgccccgccccccatgcatccatttataggctctccacaagggtcgcattccattcccagagctatgaacatctgcttttttgggacaggaatcttggtgatgtgaaacctccctgatcgcacatccattcataggctctctgcagggggaagcacatcacatgctgttggctcatcctggcagtccagcctggcgttgtctacacaatcctcatgcaattttgtatttacgataatcaggagcatttcatcttttattccatagcaatagtttcaaggggtcttcctacactgtgactttttgaaactcagaggtataaacatttatatgttatgataagatgttttaaaatgttcatgtttatggcttttaaaaatgatcttattatcagttccacatttagttacttagtaattagaaaagatggcctatatggtactcattttttgaaattgttggtatgttcttagtggtcttttatggaagtaatattcatatatattccctgagagattgaaaagaatttgaattattgaaatgttgaatgcagtgctgtatataggtccattagatcatgcttgttaattatgttactcaaatgttatatagactttctgaactttcttgtctgtctgatctatcaaccattgaaataggtatgtaaaacttttccaatatggttcttttatcattttcttcttgcagttctatcaatttctgtttttcacattttgaagctctattattaggtgcatataagtttagaaccattgtcttttcttaattaaattatattttattatcatgtaatggctcatttttttctccagtaataaattttgctttaaaggctactttatggacattaatgtaactaaaccagatttttttttttttttttttttgagacagagtcttgttctgttggtcaggctggagtgcagtggtgtgatctcggctcactgcaacctctgcctcccaggttcaagcaattctcctgcctcagcctcctgagtagctgggattacagggatgcaccaccacgcctggctaatttttgtatttttagtagagatggtgtttcactatgatggtcaggctggtctctaactcctgaccttatgatccacctgcctcagccacccaaagtgctgggattacaggtgtgagacaccatgcccagccactaaaccagatttttttttttttttgagacatagtcttgctctgtcgcccaggctggagtgcagttgtgtgatctcagctcactgcaagctccgcctcctgggttcccaccattctcccacctcagccttccgagtagctgggactacaggcacctgctgccacatctggctaattttttgtattttttttaatagagacggggtttcaccgtgttagccaggatgatctcgatctcctgacctcatgatctgcccacttcggcctcccaaagtgctgggattacaggcgtgagccaccgtgcctggcctaatccagatttttaaaagttaatatttaactagactatttttttatctttttacctttagcatttctcctttgttatgttctggatatgtctctatgaacaccctaagatacagcttatttttaaagttaatctgatcatctttgccttttaactagaatgtataatttattaatatttaatataattacttttattttgaaatgtattactaccactatattgtgtactttctataggttctgctttttctttttctttttttcttcccacttgtcctcttttgaattaattgagttgcctttttttttttcaattttcccctattttagttggaaatatatgttttatttcaggattattccaaagtttgttgttctcaacttaacaatattgaaaataacttaatatctttatctcctccaaaaaaagaaaagaccttagaatgctttaagccaatttgtccttctgacatatattgtgtattagccagagctctccagagaagcagagctagtagactatttagatctagatttagatctagatatatagataaatagatgagacaggatttattataggaactgactgtggcaatttttgaggttgagaagtaccataatatgccatctgcaaactggagaaccaagaatgctgatagtgtggctcagtctaagcccaaagtcttgagaaacagatgagccagtggtgaaattctcagtccaaagctgaaggtctgagaaactgggggcctgccatcacaagtcctggagtctgaaggccagaggacatggaatcctcatgtccaagggcaagagaagatggttatcccagcttcaggagagagagcaaattcacctttctctctgcacttttatcctcaatccattggatggtgtctccccacagtgggtgagggcagatcttcctcattcaatccactgattcaaatgccagtctcttccagaaacatcctcacctacacacctataaataatgctttaccagctatctggacatcccttaaaccagtcaagttgacaactaaaactaagcaattacaaatggtatttgtgatcagtattttaattccacttttttctgtagaattaatcaaatttacattttacttttaatttaggaatacatttagatgattcaaaattttaaaactgttgaaagatactgtgaatagtctccccattccagctacccaattttcttacttggaggccaccgatgttagtttctcatgtatcattactgagacttcttaggcaggtgaatatatccttttatacaattttattctgttcttttttcctttcctaatgttccaagattttcttttattattattttctttctatttagaggacttcctttaaaccattattttatagtaggtctgctggtgacatggcgacactatctctttgttttacttcatttgagaatatcttgatttcgccttcatattttcacaggtaattcttggttgagcattcttttctttcaggccttgaaaaatgtgccagttccatttggcctccatagttcgtattagaaatgtgctgtaatttattatttttcccttatagtaaggtgtcatttatctcttgctgctttatgattttttttcattgtctttagttttcagaagtttgactatgatgtgtcttcctgtgatttctttgagtttatcctttttggatattaaatatgcaggtttgtactttttgccacatttgggaaattttaaactattatttatctgactactttttagccccaccctctttctcctcccctgggatttctatgacacaaaccctagatcttttgctataatcccacatgtcctggggctttgttcttttttattctttcagtctattttctctttgttgttcagattaagcaattgctacttttgtatcttcaagtttgcttttttgttaatctacatttttgacaatttcagattgccagtttttccaccatccagtttgggatacatgaggcaagaagaaaacctagggctatcaccacggtgctgtccctcaggccccgaggtcactggctgatctgccttcttctctccaccattcagagtcttcttaggtttattttctatataatatccagggtttttaattgtacttagcaggaggaacagggaaaagtccattaactccctcttcaacattattattttgtatagttaatgtctctatatatttacccacatggtgtctttgctcactgttccttcttgcatgtcaaaccatatttctggtatcattatctgaagtatacccttcaaaaagttccttcagttaactgttggtagaaaactttctcattttgattgtatgaaatgacttctcttactctacttttggaaaaaatcattttgtttagtacatccttatatattgacagttacttctctcagcaatttgaaaatatttctctgctgtcctctggctttcaatgctgctgttgattagtcaattgcaatgttacttttcatgtcatacatcctttctctcaaaggatcctttctttgttattgttgatctgtagttttcccatgatgtatccacgtttagatttctttcctcatagcttgttcagcttcctgaatctgagccattaactcagattgttgtatttcatcagttctggagaattcttggccaatatctctttaatattatatcttgtccattttctctattatttccctctcgtactttttaaaaaggtcatttcaccagattcagtgtctggtaagggtccactctcttgttcataggtggtgctttgtggctatttcctcacatggtggaagagggaaggcagccgtcagaggcctcctttataaaggcacaataaatgacacaataacatcaagcagtggtcctcttattagatgcactttagccttctgagtctgccttccaggtatctcaaactctgatatagctcatttctttgtttctctgtgctgctttcttggtgattatttcagatctatcttccagttcactaattctgctgttaattgtatctgatatgacatataatatgtcgactacatctctaattttatttagtatacttttttatttttcaacttcacttttcttcaaacctccctgcacattaaaaagatatctatttaagataaaaaaaacttcaagcatatcaaagtaaaaagaatagtgtagtaaagccctgtgtacccattatccagcttcaacaatgaacaattcatagctaatcttgttttctctgcatcctcacctacttcctttcccactccagataattctgaagcaatcccagacatcatattattttatctgtaatagttcaatatgtatgtctagtagataaggattcccctttaaataaacaatactaccattttcattccccctaaaagtccactgtaatactatttgtaattaacatcaaatagtcttttaaaaatattttatggtttgtcaatcatacttttaatatactcctttatttcttcaaacacattaagcatactaaatttacattttattttattttttttacaatatatttagtccttgtgggcctggtatttttatttgtttttttctgctggctcttgctcatggtagtttgttccctcatgtatttgtgatttttttttttttttttttttttttggtggggagcttatggtcattggaactctgcaggaattctttgagattttggttaatgttcatttccccagagatttgtgattgcttcttccaggtactaggcaccttgggcccacactaacctgtaatcatgagaattcaattctcaggttgtgtttttcaggctatagtgtaaatttcacaccaagtttatgtgactgtcacctattattggtaatacttagaagagcctttattttccttccttacccacagtcaaagctgagagattcaagactgtttatggtctattgcactgatattaattttatttttccaatttgccttcactaaggctgttgccttttgtagaacttgctcttgccttcactaaggctgttgccttttgtagaactgtctctatgcaagggtctcaatttgcataaaccccagacactgtgtcttgtccctctgcacaagcctatactctgtttaaaaactcttaatgatcatgtattggcagatttcctgaagacaagatttagtttcaatgctcagttattgcttggattcatgcctttttactacttttatcctatgagggtttctttcactgtgttctactcagctaaggatttaaaatggtattataaatatttcattcagcattttaagatgttctgtagtaggattcctcagaatatctgctgtgctgccacattcctacaaagaggaaggaatccaaattattatgccttaagtcccacctgatttactgccagaaattagccttcatcacagtgtctcccagctgttcctgagagcttctcattcagggggctatctgatgttgtcttagtttatttgggtgttctaacaaaataccataagctaggtagcttataaacaacagaaatttatttctcatagttctggggctgggaagtttaagatcgagatgacagcagactctgtgttcgggggtgttaacggtgaagggtatacaggttcttggggtttcgaacaaagaattggacaaaatgcacaaacaaagcaaggaaggaatgaagggttttattgaaaatgaaagtacactccacagtgtgggagcgggcctaagcataggggctcaagggccctgttacagagcttttgtgagtttaaataccctctacttggggtacgccctatgtaaaagaagaggatgtagtaaagttacaaagtcatctatggcattcaccctatggagagggcatttcctgttatagctgaagtgtgaattggccttatgtttcctgcctccagatcctattttcctgcctcaatgagggtccgctctcttattcatagatggtgacttctggctatttcctcacatggtggaagagggaaggcagccgttggaggtctcctttataaaagcactaatctcattcatgaggggtctagccacttcccagaggctgcactcctaataccatcacattggtcattagtttcaacatatgaactttccagaggacacaggcatccagaccatagcagattggttctttggttcggatcctctctcctctgttctgtctgtctcatctgaccctcatgcctctgctgctgataactctcattagtttatcattctgcttgacaaagctgtcctttgttggtgaccaccagtgccactagtagttttggcaacagacgttgttctttacttttacttcacgccaaatatgggataggcccttgtcttcgattctctaaagaacagaaggtatgagagagagcattataacacagagatgagcttacaaatacttcccagggccagaactggactcaggacttctggttgacctgcctctctgtatctctcctaccttattgccatgggccagtgggtagtttacttttcaacacccaagttcctctactcactgatgggctttggagtctagactaaaattcgaagtcctaaagaggggaattttcatgctcctttccccaggccaatccccaccttcccagtccctattctctgccaggaatgactgccactcatagtcattgcaggaggatgttttgtgtgtgtgtatgtgtgtgttttcccagaaaagtccagagagatatggctctaacctatgcacccctatctaagacgttaaactagtctgacactagtgcattttttccaggtctaggtctttgagtgttgtgtgtaagactttatcaattcatctcagtttagacttcactgagcctagtccatttctttttctgacatgctatagataacaacttagataataaacatacacgagcctgcccaagaaacacataataccaaagaggcacaaagcagtctaaagctgtatttagaagaaaaactgccctctaagggacaaataatcctcagtgatgcagctgtctttaaaacatctacccaatttacctgactacacagaacactaaatattcaggttacttcactgcatttaggtttttaccaacaatgtgtggtaatatgccttagatttgcataactaagagtctccagagtggtaggtgttccagaaaaacaaatggaaacaataatcagcctcaaaagtcaactcaaatctccacctgggacctccatctctcagacacacacttacaaaccaaaagctgcaactctttgaatagcaattttccagctgctgcattcgtatattttctaataagaatgttcatctactacaccccttacatatctttcttaagctatcataaagcacggtgtcttactcttagtggatacttgttaaatgtaggttgatgtcacacattagtgtgaatgattcttagtgagcatgattcctctctcttcctactgtgctatggaaattagggctttgatgcagggtggggttgaggtttcactgcaatatgtggcacttgagatctttaaatccctgctctgccaaatattgtgtgaccttgggtaacttattttttctaagcttcagtttccttgtaaaaatgttaatatattaaagaattcagcaaagtgtctcaatgaatattaacacttttctctttttgcttctaccacctctcagcctcaacataccagaggccaccctggctccagggatgaccagaagaagatgcagcccagaccattcctgcccatgtttctgagttctaaagattatttgtagttatactgggacatccccagttcagatgtgctacttgctttctttggctccttcaagcatttgtaggctattccctaaagctagaaagggatcaaggaaggctcaagccctattgttacaggaaaggagtcctggtccagaccccaagagagggttcttggatctcacacaagaaagaattcaggatgagttggtaaagtgaaagcaagtttattaagaaagtaaaggaataaagaatggctactccatagacagagcagccccaagggctgctggttgcccatttttatggttacttcttgatgatatgctaaccaaggggtggattatttaggcctcccttttttagaccatatagggtatcttcctgccattgccatggcatttgtaagctgtcatggcactggtgggagtgtagcagtgaggacaaccagaggtcactcttgtcacgatcttggttttggtgggttttagctggcttctttattgcaaactgttttagcagtaaggtcttcatgacctgtatcttgtgctgacctcctgtctcatcctgtgacttagacgccttaacctggcgtctaatctgggaatgcagcccagtaggtctcagccttattttacccagctcttattcaagatggagttgagctggctcacacacctctgacactattaattagtatttttcaaactgttttgactcggtgaatctggaaattagtgaataaccaacactttgaaaaattatatagtataataaaaaatattcatagttagcagaaataatgttttgtgaaacttttgtatgaaatgagtcacattgggtatacaatgtatttcttatgtgaaagttgttagaatccaaacggagtcgctaatgttaaaacaaatagagcctgacaaatagagccagggaaggcaatgaagagagggttctcatgactggtaagaaaaactgtcacaaaagactgcaaaaactacaactttgaacgaaggtcattgcaaccttacacaaaaaacacttctgcaaggttatctactcatcagctgcctgtccagccttggactggcaccactcttgttattgacctctggagccaaggataattatttcaaaacaattatgtgataatcctcctcattttttcctttaatgatctttgtcttcctttacctccctgaatacactttggttcacatagtcccattgcaatactttattcacaaagaaacattgctttctttcttttagagagtctctctttattatttaggttgacacttactgtggattgccatcaaaaaaatctgagagacactacgttcaagagttttgataggtcaggtgttgtggctcgcacctgtattcccagtgctttgggaggccaaggtcggaggatcccttgaggccaagacttcaagaccagcctgggcaacatagcaagaccccatctctaccaaaaaaaaaaaccagatagccatgtatggtggcatgtgttgtagtcctactcaggaggagctatgattacactactgcacttcagtctgggtgacagagcaagtctttaaaataataataataataataataattaataatacaaagaaaagattaaaaagagttcagataacataaaaattgtcttaattatataaaaataaagtaacataaatgaatattctcagataaacaaaaatagcatgccccatttaatagattgattgctctattggccctaattatttactattctgtatgtacatcctatgccacaaaacttgtagtacattcccattctgaccatgcactcagttttgtgacttgatttggccaatgagagattagcaaatgtgatgtgactagaggcttgaaaagcacttgtgaaattaggcttgctgttaactctagtcttttgccatcactgtgaaaacatgtccaggctagcctgctggaggataagaatcacatggtgcagagagaaatggccctcatctcccagccacgattatcctagacctggtgaagatagccaagcaccctagaaaagatcagaagaatcgctcagctgagcccagtccaaattgcccagcctgctaatcatgaattaaaaaaatcttctttttatatgcaatgggggttttgtagttgtttgttatggagcattattgtggcaatagataatttatataccaaataggagatttagccattaataaaattcatgacaataataatcattgtaataaaagatgtatcaattttccaaagaccatctcacttggtaatcttgaaaataacttttcatctttatatttcacattttctgaggcctttactaaggaaagggtttatttagttaatttaatagaagacaaggtggcagaggaagtagatttgctcaaggttactcaacaaggttctgttacctggattcagtctcccaagaattctctttatcagaacagtctgcaagttgctgacctctcccatcttccaaaatgaaaagcctgattcctacccattcttctggatctacctaaattttcataaaagttcctatgggatgtcagtttgaataattagaattgacattttgcttacaagcaaaatagaggctctttcctcaggaaaccacaatgacattaatatcctctgagagcattctgtcctccaaataacctgatttgttttccctaaatttgcattttcatttgatcattaaaaatgagttattctttgtaataggaaacctgtgattctcttgaatagttgagtttgacctgttggttatcacagcaagatcctggtgccatttgctcactggacattcagttttcaggtgctaccagttattcctgcccctaagaatgaatattcaccttagccaatgatgaaggcatggagaatggcaaagtggtagtggaagtgggagtggggagctttgaggttgcttttacggaatccatatcagtaggttaagaaaacatccattgtccatattaaagaattgtgtctctgtgtgtgtgtgtgtgtgtgtgtgtgtgtgtgtgtgtgtgtgtatttatgtatgtcgataggagagaaatggaacatagggcaaaatccttgaaagcccccccttggtgccagcaacctccatcagagagacctgataatttatgaatcagaaatagccccaaataccctgagtcttattgataatggggctagtaagcaataacttcatgtatgtctcaggtatatttcaatgtcacgtttatgatcccgaaagaaaggacatctggggggacacctgctatgtattggtcagtattttgggtgctggagagatacaaacaaataagactcaatcctaaactaagaggacctagtctgcaattggttgatgtgtttgtctctgtgacaccagagaagaggtcagtgttttggctctatgatgacttcatttcaaaagcccaatggagcttcttcctccccttaaaatttatctgattccttgatagcttggttgttgtttatgtcttctggtgcttttactttgagctgttctggggtttgcatttggcacaagtaaatattgaatgaaaagtattcattaaataaagatagaaacaatgatttttttaatgtctcaaaatgaacgatcagttggtttgacagaattcgcagaagacagtacatgtgtttgtgtgcacacaaaaatacattcaagaatcagatctgatatatatttttaagaacacaagtactttttcagctaaggatctaaggttgacttgaatcaaaatttgacttacatttcccctagtgcttaaagcttgattcgaagcttaaatacttgggttcaaagtacttcagcgtttaacaaaatcctttggattccatcaaaatagtagattaagtatgcttacttcaatcccctgcctcacaaaatgcgactgcaaatctattttaatgaatgtttcacataagtcttttcttgagaaatgattagtaggaaagtttaagacaatcaattttagttagaaaagcaaaacatttctgaacgaatttaaaataagatttgttttattaagggtgttttttaaatcaaccttgaaatcatgtaagttataggaaaatgaaatttaaaagaacatttttgccgtcatggtgcacttaagtatttttaaaatatgttagttgtcattttttatgttgttatacatttattatttttatgaaataaagtggcactcataatgaggtcactatttagtgatccattatcacattatcaccaataattataatcactgagtggtacacacatgtatcatacacatttttgtttagggttagattatttttactctaagtgcctgtaatctattcaacctcataaaattcatacaggatttaaaaataatcaatataaatatttcctgaatataggtgtgatggttaatactgagtgtcaagttgattggattgaaggatgcaaagtattgatcttgggtgtgtctgtgagggtgctaatatttgagtcagtgggctgggaaaggcagatccacccttaatctgggtgggctccatctagtcagctgccagaacagccagaatataaagcaagcagaaaaacataaaaagactagactggcctagcctcccagcctacatctttctcccatgctggatgcttcctgccctcaaacatcagactctgcgttcttcaattttgggactcagactcattctccttgctcctcagcttgcagttgacctgttgtgggaccttgtgatcatgtgagttaatacttaataaactcccctttatatatatgtacatatatatacacatacacacatatatatatatatctccaattagttctgtccttctagagaaacctaatataataggtataatttattatcatgtattccaatattatcttctacttttgaggagaccagagggttgtgtgatcatgtagaaaaatgtaactaaaatatagtagagctggaaagaacccaacataatccaagtccttcatttaacacaggagatgacttgactcataaaagttaagtgatttcttgaccattctaacctcatatactaagacaatttcagaaatgttcatcctggagatggcagttggagtaacttacacataattgcctctgctgagtcttttaccaagcacttttgaacttcccagagtacagtacaagggtaaaatgtcaggctacatatgggagctaggagtgggtagtttggctgatgtgtaactatgatgtgttcttcattactcatgtaatactcatgctgccaagagctcacaccagagactaaactaagaaaggagagcaccagaaaggatagcaaacaactccactggagatagcatgctggctctacactggcaaatattgacttagagatcaaactttttgctagaaccgttaggtgatattagtttctgaatcagagggtttcacacctgtgtgccactcaaaaccaggtgtgtggaataacccggacaagactaaggtttatgaatgtcattagtgagatgccgagatagtgtccccggttcacgatcaattatgataacattgtgaaaattgtctttcaggaggctggcagtcagaacaagcttcttcaagagaaattccatattgaaaattgccagcattcatatgactagttgaattgggtttttaggtgaggaggcagtgcaggatagtacaaaggacctaggctttcaagggaaacaaacctgaattgaaccttaactctaccgcatggtgattgtgtggcttgtctgtaaaatgggaataatgatactgctctgtcagcatggttttaagaattagaggcaggtatatacaaggtatatagtcgatgctcagtgagtggtagtctttattaattttcccccatccatttgaagaaggacaataatagtacatgggctcccatcattaagccattattattattatcattatttgggcgacagggtcttgctgtgttgctcaggctggagtgcagtgatgcaattatagctcgctgtaaccttgaacttctgggctcaaatgatcctcctactttagcctcttgagtagctaggactataggcgcacaccatcatggttagctaatcttttagttttttgtagagacaggatttcactatattgcccaggctggtcttgaactcctggcctcaagggatcctcttgcctcagcctcccgaaacatacactgtacccggccctgaacctttattagatgtcaggcaagaatttaataaacaatctttttgagttcttcacaacaaccctatggactaaatattattgatgtaatttgtcataaacaggaaacttggacttgctaagtttatgtaacataccaaggtcaaggacacttggaaaataagatacagaggcagggttccaacccgggtctatccagcctttccctaccattctacaccctctctcatatcctttggagtcaggagactgattctgctccatagatggtccttctttccatgtctgtttaggctgaaaagaaagacatgcatgattaactaataaaaacgtctttaaaatctcagaactaactctttaaaatgaatgtgagggggaaatgttccaaatttctgcagcttttagttgagatcctcagaaaccaaggtgaaactagaagacagtgagacagatgtttgacttttagcttaaacagtgaaatttttagtgctctgtgtttgttttagaacatattttatagtggttgttcttaaaatgatgagaagatagaaatctcttttagcgtttggaaacacttatttttcattttcgtttgagttacaatgttacaattggctttagaagataaagtttttaagacatttaccctaacttccgatgttagctgatttccattagctctgctgtagtagaattcaggtaaacacaattttatttcatgccttccgttaacaaagtcaagtcaaaagatgaaaacatacaaggtcatgttcctttcagtctgacaaagcatttagctgggattatatttattgccttggggttttcttgcttctaaaagattgttcttacttctttgggttaagctgtctagtgacaccttgttacctggatttgtagctggagatggtggttggttgtttttataccccaggacctgcagggacctggcagggggctctccctttctcccacatccctgcaggtcctagggtgtaaaaactttgggaaaacagcctatagcaaaactgctcacagcttaattaatacaattgaatatcaatttgttaccttactgatctgtccttctctcagtgttactatagttggaaagacaaattacaaccagttaatccaccaacaagtattttaggaacattttaaagggtatctagcaggctattgacaccttggcagttgcaaggaagtgtagcatactggaacgagcaaagagttcctggagaagaaagtttgagtctgacgacgataagacagtggtgctgctgtagatcatgctggtgggggtactaactgcccattactgagcatctttcaggtctcagaattagtgatctgtctgtttctaaaactcacactctttctaacacaccctacttccttataactggtgcaccttctcccgcatggtactaactcttgggtcacttactgtaatgtcgcattgttaggaagtaacatgcatgatacaaatgtgatgccagaaatgtaaacgacatccttcacctctcgaaactgcattttcctggggatgatcatacctatgagataattaaagggtagttgtaaggatcaaggaagaggtcgatgcaatgtgccaggtgcatggaagatgtttcataattagtagtaattattaatattattactattactggacacagtcttgccctctaagaagtctcagtgatgagaggagagttttaagaatacaattaacagtgacaagtgccagagaggaaccaaaagttaaagaaaatatgactcaagaaaataagactcaaatattgctttgttagctcagagtttttggaaaaggaactcagggaagtcatgaggctgggcatgaagaactcactgaaaattcatacaccttcgctgggggtggtggctcattcctgtaatctcagcactttgggaggctgaggtgggagaattgcttgagcccaggagttcgaaataagcctgggcaaaacgacaaaattctgcctctacaaaaaatacaaaaattaccagacatggtggtgcacgtctgtggtttcagttacttgggtgtttaaggtgggaggattgcttgagcccaggtgcttgaggctgcagtgagctgtgatcatgccactgcactcagcttgggcaacacagcaagaccttgtctcaaaaaataaaaaaaacaacaacaataaaaagaaattcacacactcattcctgcacatacaatgcattagacagtgtctcacagcatactctcttacttagcagtttcaccctggggctgtgttaaaactgatttccgagcctcctctccctggtctttgggtagctccatttacgtttctgggacgactcagccccatttttctgtccaactggtcctgctgaagccactagtgatggcttctcttccacagagcaaaggctgaatatattgaagctgtcttaaatcatagcctcgtggttcgtaagtagcaaactctgaaaagttagagtccaccaaatgctgtacaaacagactgaactgatgagaactatgtctctgccacctgttaactgtaattgtcattagctttgttgtctggtttgttgacagcggactaagagacatccaaatgctgctctattctgcctctgcaattgtttcagcaaatctcagcactgtacttgttttcgtctttgttagttaagaataaatttaaattatgtaaacaaaatcttgcttctcttgattatttcagcttttctgtctttcccctggactgctctaaatctgcatgagaacaacactgggcctcagaagcccctttgtagagatatctcaactaacactactgaaaaacagctcataggtggcatctatttatttgtttgtcatatcgagtttaaaaaataggtaatacgtgttcatagtaaagttttcaaatggaaaaaaagggtttgtagtaaaaagtaggtttcctttcccaatttcccttctaacttttttttacagcatgtttgttgtatgatacaatccgatctgagcacagatgaaatttgaggtttcgtgttgcagaaaactttatcaatgctgtcagtttacaactatgaatatattgaacttactgacaaggagtgttccctgtactgaaatatgacagcagcagcaacagacaggaaagaaagcagagggagaaaagagagcacattagaggtgggtgaagacaacatccaacttttccatttttttccttttatttatttattttttttgagatggagtttcgctcttgttgcccaggctggattgccatggtgtgatcttggctcaccacaacctctgcctcccagattcaagagattctcctgcctcagcctccgaagtagctgggattacaggcatgtgccaccacgcccggctaattttatatttttagtagagacagggtttctccatgttggtcaggctggtctcgaactactgacctcatgtgatccacccacctcggcctcccaaagtgctgggattacaggcatgagccactgtgcctggccgtaactttcccattctaagctggcatgtgaccagctcgtgaaaggactgattagggagcttcatggtgaaacgtaccatggaagtcagattccacccccatggaactttagggaaatcaccaccaaagtcctctgctccagctttgcaaaataatttcaaaagttattttgaaaacaaaatctacatagtcatcagaatttcaagtaaccactcacatttccctggctgtcctgaaactcttattaccacttcacagcatgaaaccaagaatagaaaaatgtgtttacaatgcttacccataggtttttcttccaaatacctattctcatttaaaaaaaaaaaaaaaaaaaaaactaaactgaaaacaaacaaacagatgaaaactccaaaagtcaaagaaaagcctcaagagtccttctgtgccccaggatgctcttaatttctttacaagcctgacttccttgggtctcctgcattaggttcagggtaagtacagaccaactgtttatttgtttgtcgtttacctgcacaaaagtattttgacggagatggtcactggaagttcaattagacgcctgctaatggtaaaagataccatttccaaatttaaatatttcacacatggatcataaatgataaattttactctcacctaccaccactcccttcatcttccctaaattctccaggctttggaaatccccagtagagctaacaaacctgcaaaacctaatgaaagctaggcgaggtggctcatgcctataatcccagcactttgggaggccatgattggaggatggcttgagctcaggagtttgagacccacttgggcaacataacaaagccctacctctacaaaaaatacaaaagttagccaggtgtggtggcacaggtttatagtcctgggttctcaggaggctgaggtgagagaattacttgagcctgggaggtggaggctgcagtgagtggtgattgcacaactgcactccagcccgggagatagagcaagaccttgtctcaaaaaacaaaagccaagaaaacaacaacaaaacacacctaatgaatttaatctcaggccaaccagaacaaagatttaataattattaattcattatttaataagatagttaataatttctatttcaacaactcttccaaaatgatacataaatggtacactatgtatttgtcagattaggtagttttttcaattctccattctccataacctagtcctcttttcttcccctattttatttctaaatgtgcttaaaattatgtacctttcagtttacacatagccaggaacttatcctgggagaatttgcctcttcagcaatatgtcattcctggcatatacattccatttaattattgattctaagtttcttgaggccagggtctgtgtcttactttacatcacattcatagcttctaaagtgctatggattaatgatgcctgagtgagtggctaaaaggaaatttaaaacttgacatacgaaaagacggtttcaaaatttaggaaggtcaaaggggcatgacagacatcaaagataattataaaagattaaagcagcagcagagggataatgtatgccgatttctcagaaaagcaaggaccatcacaaatcattaaaagtttccaatactttcttttttaagtgagagggactaaagccatctactgcttctttctttttaaagttttcagttgtaaaaattagtctaccttccaaaacatgtttagaatatataagttgtccatctgcttcttttgctacttattgggaagaattatgctcagggtcattagaaaagtaattccctcttgatttttcaagaaaatcccagatgtgacctgcacattgataacagagaatttagtttgccagcaagagctaaattggattttggttgcatttttcaagtagagttgttatactttcttcctttctcaaggacaaattcaaatatcttttttcttcttgtccatgacagttaccctgatgggaaactctgctagaatgtaaatattttgagatggtaaaacaaaaacaaaaaacaaacaaacaagaaacaattgacatgttttttgagaatccacttgtgagatcaaagtatcaaattcaactctgaaatgtcatacctggggatgcaattattagtatactaatcttgctctcaagaatactacatgagaggggctgagtgattatgcaaaccagatgctgtaaattaagtcactttgtttaaaatgaccaagtctttagtggaaattaatcacttgaaccctggcattatttagacacaaaacagtatgatccaatggtacaaactgtcaatcatgtacacacagcatctattaatgttacctggatgacactttactctgaattaatgataataaatttcaatctgttaatacaaatgatgggccttatgtattaaagtaatttaaaagtgagataaggaaattattatgaaatatatgttgtcacataaatttgcattttaaccaaacgctgggctccatgtgtgatctgagggcaacattaataaattctctttaacttgagtacaacttctgaagcagaaacttttgcctaagagataaagttctaaaataggctgggcatggtggcacacacctgtaatcctagcactttgggaggcagaggtgggcatttaaggccaggagttcgagactagcctggccgacatggtgaaaccctgtctgtactaaaaatacaaaaagctaactgggtgtggtggtgcatgcctgtaatcccagctactcaggacactgaggcatgataatcgcttgaacccagaaggcggtggttgcagtgagccgagattgtgtcactgcactccagcctgggtgaaagagtgagactctgtctcaaaaaaaaagttctgagataacttccaaagtaaatataacatggccaccacaaattcaagagtgtgatggcatttaaatttattttcttctgaagtatttgatgcaactcaaaaaaaatgactacatgttagggactttagaaaaaatactcatattaagaaaaactagaaggaaatttgcaaaactggaaatagtcatgttgggctggtaagattacagatgggtttttctcttccaaatttttgaattgttgtaataaaaagaaaatggctcaattgtgctctaggtctagggtttgattgattgggttgggagtgctctgggcactggcttttcccctggaactgtctactgtttgcagaagctgcttttgtgtttttattaagacctagaggaaaagaagaatagatatatgtgtgtgtatttgtatgtgtgtgtgtgtgtgtgtgtgtgtacatggttcttccttataatgctgcccttttttctgtatgaaaaagggtattttctttgtacacattctctttttcctcctttgcctgctttctaggacaacatgctgaaaaaatatcaagacaacaaaaaaatttttctaaatctggttacaagtaattatggtttcctgttctacatcattgtacgtgtgtaaaaacagtgtcataatctgtagaaatgcacatgattaccacacccttcagcagactttctaatcatattagtaggttaaggtaattttcaagtcacttgcaccatgcaattcaaagacaccaccttttgtttgtgtaagcagtcctctacatatagtcattctaggttaataaattttggctttaaatgtaaaagtaaaactgagagataagataatattgaatagtgaatgaagtaggaaaatatgtattcaagttttgaatacatatttgtttgctactcttagtccctcaacaggtcttagactcagtttccccacctctgcaatggctataatgctcttaccctgtctgtctcagaagattgatgtgaaaatgctctatgagaactggctgttatcaataggtctgtgcaggtcactctgagtttcattttgttgttgttttctctgaaaaccacagaagaaaaccttcagctcttctctccaagaacacatcctagtcatccagcccaacctccttttgttatgtagctcacacacatttcatcctttctagtactaccattcacaggcatggatctacatgcaatcagagaccccttaagctgcccggacatttattttcagtgactcatggtgctcattgaaaccagaaggaccatcatccaaagccactgtctctggcactagttctttccagacaagagctctttgctggcagtaggctaaatcaccatcttgcaatcatattctatgaccaaaatgtctctggaggacttttagtttattgtcatttgtggaaaataggaagcctgcatgaggctttctaaattcttaatgtatcaggtaggattttgaaacaagtcatagctacaggcagaaatagtaaaaaatgaagcccaggttgacttatgaaatacaggaacttgtagttgcctggacatcaagctgctcctagtctgccttttcaatttgccaatattttcccttaagccttttgatgtgattttgcagttgtagttcacaataaaaggtagagatttcagggtatgtcttccttcccttcaagaatatagcatagcaatagaaacacagaaagttcttggtctatccataggacagaggcaaaattctaggggtctctgaaatatcagagaagctgggagatgggaggcagatgttcaacagggtttggtggagcaggggaaaaccttggttctggaggaggggaaaggaatacagtgcaaaggaggctatgcccacctggtgaggcaccttcatgaagggttgtaaataggaaccagaggagaaccgtgtacatttaaatacaaaaataaaacaaggagaacaaaaacagttgaatgaatatttagttgggtgtggggactgagtttctctgagtttaggatcgtattaaactcacattaagggcccggccaggtagctcatgcctgtaattccagcactttgggaggccgaggtggcagaatcacttgagcccaggaatttgagaccagcgtgggcaacataccaaggccctgtctctacaaaaaattaaaaaagtagccaggcttggtggcacacacctgtagtctcagctacttgggaggctgaggcgggagaattgtttgagccaaggaggttaaggctgcagggaaccgtgatggtgccattgcactctagcctgggtgacagagcaagaccctatcttgaataaataaacaaactcacaatagggctcgacagggtggggaagaggggctagcatttcatattatctctattaaacgtgggcaaaacagatccattttctgtttacatgaagcatatgggggaatagattatagtacaattagacaatcacccaggttgaccataattataaaatgtgggaggtgccacaattaagagaacaccactgtgagctaagaagaatgcacacttatctcacttacacctattctagttgtgggtcaataaaagatttctctaaggtggagacctttggactgagaccagtaggatctctggaggtacaggaaagtgaggaacctctttgtgagctgtagagtaagccagagtccagagcagatggcctcaaagggaccattctgagactgagagagtgatcaggagaaaggtattcatcatggattatggattcctgaggacagggtgggatcatttggaaaggaaggaaagcaaagccttgtgggggtggtgggtgaaggcctcatctgcccattcctgcccctttgcaaggacttgcttaagcaacccagtatctgcgtttgctgcattgtttacaaagtacatctgccacttctccagctcttgacgcttacctgcatggccttttgtcagaaagacctggaaactcttaaaagtaggtgtgagtaccccagaaagctgtaacactgaacttcttggaaactctaagaaatggaaagaaattgaccaaaaagatacttcttaggtgaggctgaggaccagggatttgggattcgagtgaccactgcctcctgctggcagaagagagatcaagtgacagttcagagcttggggctgaaaagcctgtaatttatacattgaatctcagatcattccaatgcactcaaatggagagcactatattggtctaacgaccaggaagtttctgctttatgtcaatttttagagaagagtttagtccttttctgtccacaatgatagccactaggcacatgaagctgttgagccctgaaatgtgcctggtccaaattgcaatgtgctataggtataaaatccacaccagattttgaagccttagaaaaaggaatgtaaaagctcttattagtaattttttaattggttacttgatgaaatgatggtgtactggatatgttgggttaaagaaaacactttgttaaaataaatttctctttctttcccctctttttagatatgggttactagaaagtttaaaatgacaccttcatgtttgtgcctctcactctttctactgggcagcgctggtttaatcagacaaagcatcaccatctctatttcatttcttctcctgcagatagcaatattacccaccacagcaatgtgattcagaacatcagtgatggaagagaagggccacttgattctgtgttggcttcactgtgctgcattctcctcacctcagcaatctaagacatagtgaaaaaaatactctgacctgtacaaacctctgcttccttgaagtttctgccaatagaaggatggattggccactcttctcccagctcccctgagctcgtcatctgcctggcttcctaggcacttgtatattgaggattgttcctaccagttctgtctttcacagatgtggctttggggaaggacctgcaacagttctcagggcacggggggaaaaggtggcattgagccaggatttttttttccttcctaatatagtgtttacaaaggcagctgcaaagccctcgcttcccctcaacacagagccttacacctgacacctctgttctccttaaaactggaataggccattcccaggggaatctgcatttttaggtggatttcttcaaagcccctaaagcttgcagtatgaaaaaaaaaaatgggccactaatgaagtcgtttcaaatctgatggcagagagtgagaaagaattcatcccctactccctctccttttcaagccagcctcaggaaatgtctagagttcatcttaaagggacctaattgagatggatttagaactgaattccaatgatactgaagaatttgggttgagagagaagtgaatgtgatcattacagtagtagcttgtgttgattaagccccttttgaccctgttatcaattaatctttgtaacagtcctatggggtgagcacaattattacttccattttgcagcagtataaactgaggcaaggggttgctacataagatgcttaaagtcataacctaaaagacagcaaagactccttctagcctaactccaggaccagtgcactcaacttctccaaacctccctactaccctgtctcccatatgtgaaggggctgcagaagaaatgagcaagcttggcttcgtctgtgtgttcccatcagtaaatttaatttttccccataagttccaaaattttatgagcctgcagacatttttgtaacccctgaaatatttatgattgttcctacacttaatgcgaggtcttggctttcctcagtgttggtggagagcatattggatagaagataacttccgatatgtgatattttaaacttctaggcactgcagcccactgaaatgtaagtttcttgaggaaggaggtttttcttatttgtctttgtgttccgagttttcatggcggtgtctggcatgtagctggtatctattaactacaactaacccttccttccaagtcacatttgaataaaatgaacaaaaatacagactggaagagttaatattccctttccaaagaactaagggaatagttactcactagaagataatattacttattatctcttatataaccttttaaattcctttcacccagaaactttaattaccaatgggcaaatgcttctctaattatttggacctaattcctatgtcatagtcaaataattggacttttaaattttaacaagaataactacaagcaagtaaacaaactaaataatgcaaacattcatatttcacagactttcttggatcaaaaaggaatatttttggtaactgataattttagggaaccgattatattctattcattgcatttttctctactcaaaaagtataaaacaaatgttcattttttatgagtcaaaattgcaacatgtataaataattggttttcaatgatgcatgcaaataatatcaaaacttgttttaaatgtggaagcaattgtggatataattacagagtatgcagttcaacaccctcttgctcattaatatatatggaccctctaatggatgttcatcattccttgggaatcaaatctggcaggtcagatccaaagaagatcattcttcctggttgtcaagtagataatagcctaaaaagcaaatcaatagcaatatccaaatcaattgcaccgtttagaacagcaaggcccacttaaaactcaaattccaatttcgttagtactcagaaagaaatattaattataaggatacaaaatatgctatataaatctcacctcttctcatttgacctctcccgctcatattttagtgggtggtagccaacaggtatattttggctttggttgtagtggttggggatgggtgagaaaagttgcttcctgtatttatataactcatctgtttgtgtggacctactcacaactattcttgtcattgttgcaaaattcatagtaatttctcagttttacagattttgcaaactttgacttactcacatttgtaattacaaactgcaattaaaattctatggctttgtgccatttcctctagagcatctctttttgggtaacctgtaaaagacaaagggatgagtgggtcctgtaaactccatgaagctggccaggatggcttcaagaaggcagctttggaaatgaaggtgcataggctcaaaagtccttgggcactgccagccatctttgttatatcatctgttgctgtgaccatccctgttcccaaccctaagccaatgtaatatataagctgatcttgaagtctggagaaggattagtgagctggtggagggcaggaagaaggaaggtgtagagagtttgaacaacctgtgccaatgttcaaatggcagagagatggctcttctgaggagttgagaggagactggaaatgatggagcattgcttgcatgtgaagatgaggctgagcagttggcaagggtaagatcatgtagacttgggcaggacatgcatagccatatagaaatcaattgcaacgtttagaatagcaaggtccagtcaaaacccaaaccctaattttattagtactcagaaagaaatatgaatgataggcatataaaatatactatgtaaagcttacctcttttcagttgaccctccttccttctatttcagtggatagagtaggcaaaagaggcatattagctttagtttaaagttcattctgaaagttaggctatttggtgaaaattttcaaaggtggagcaacataactagatatcaattttagaagtgagaaaaacccatcctaaagatgtggttggagtggtggggatggatagatctttaagatgtagaattaacactattgatgactggcagttggagtgaatttagtatgacattcacatttccaggcaggtaacttgaaggacaatggtgccattgattaaaacagatattattaagtattacggttattgttagagagcaaatatgagatgagggatggatattttaaaaaaagaagatagtggctcatgcctgtaatccagaactttgggaggctgacatcggcatattgcttgagctcaggagttcgagaccagcctgggaaacatggagaaaccccatatctacaaacaaaaaaacaaaactattttagccaggcattgtggcgcacgcctgtggtcccagctgcttgggaggctgaggtgggaggattgcttgagtccaggaggttgaggccgcagtgagccaaaatgggtccctgcagtccagcctgggtgacagagtgagaccctgtctcaagaaaaaaaaaaaaaaaagaagaagaagatgataatgttttatggagactttttagcatgaagctctctaatgtgcacagctaaaagaggaaaaacaacatcatcaaaaacaacaaagggatgcccaacacccaacccccagaaattctgatttaattggttagagcggagccaggcattaggtgttttttgtttgcatttttgtttttattatggtaaaaaaaaacccaacaacatacatgaaatataccctctcaacaaatttttaagtgtacagtacagtattgttaactacatgcccattgttatacatatctgttgtgcaaatctctagaaatttttcatcttgcatgactgaaagtctataatcattgaacagcagctccccatttctctccctcactagtccttggtatcaccattcacatttctccttccatgagtttgactgctttagtagatacctcatacacgtggaatcatacagtatttgtctttctgtgactggcctatttcacatatcataatgtcctcaagttcttctgtgttgtagcatgtgtcaggatttccttctgttttaaagctgaataatattccactggatgcacccaccacattttctttatccattcatcagttggtgggcctttaggttgtttctacctcttagctattgtgagtagtgttgcaagaaacatggaggacaaatatctcttcaagatcctgatttcagttcttttgcataaatacccagacatgggaatgctggatcatatggtagctctatttttaattttttgaggaatctccataccgtttttcatagcagctgctctatcttttttccccaccaacagcgtacaagggttccagtttctccatttcctaaccaacatttattcttttctttccttctgtttcttcttttccttttttttcttttaatagtggctgtccacaccggtgtcagatggtattttattgtggttttgatttacatttctttgatgattactgatgttgagcatcttttcatacacctgttgaccatttgtatattttctttggagaaatgtctattcaagtcattttcccatttttaaattaggctattgatttttttgctattaaattgtatgagtttcttacatattttccatactaaccctttatcagatatatggtttgcaaatattctctcctattccacaggttgccttttcactctgctgattgtttcctttgctgtgcagaaactttttagttcaatgcagccccatttgtctacttttgcttctgtttcctgtgctgtcggtgtgatattcaagggatcataggcattaggtgtttttataaagcttccccagatgactctattgtgcaaccaggacttagaaccatttgtcaaaattacaccttgctatgatgtaaagcctatggttccatctagacataaaagtcctctcagtagaacagcccagcagctgaacacatttatagtctgtgtggcatggtgatccctacagggaggagtgtgtctaaatttctggatgggataggagtggggtagtgagaatgcagctggaaagagcacattcaatattgttaaataattttatctccgaataataattttttcataacttaaactacaaaaaataacaatccactggagtcacattagttcagaaagtctagaatgtcagctctctgaggacagggatatctgtctctgtccactgctgtatctccagcccccggacagtgtctggcacattgtaagcactcaaaatatatttgtggaagtggctgagccgcagattggctgtggttctgtccacagtgcctggaactgttattttcctattattatctagcctctcagctcttcctctttcctgccagccttgacttcccgtcttagctcataggaagctgtgtccagcaggcatcttccttctgtgaagctgtaagggctgtatgcaactgggtcccgagtgcaatgtgtgtgggggggggggggggagggcgggggggcgtgggggacggtcattggttcatccaggaaatgtccatttacatactaaagtctgattggtctagaagagtagctgagcacaatcagtcctgtgtgtccacagaccaggaagcttaatataagttaagtccaaccatatttaacaaaatattatgtcactgtagtgatggagtgacgatcataaaagtgttaaaatgaaaatataaagtatgcactgtattaaacttcatcccttcattgaaatcattttcacttgtattttaacaatctgcacactatcaaatgacagtctgtttcgaatatgcctgataaaattttaaaaaaccattgacttgtttctatagcataaatgtgaaagctttcagaaagaaaaagaagaaatggaatatgcatacagtttttcataatttttattttatcattttcgagcactcagatgaggatttgggaaaatcttcatgtcactcttttaataaagccacagtgagcacttcatgctgcttccacttcccacacacaaactttctaattataaaaggaccttttcagacttattcagggcatataatcttatttgcagctcctaattggaggactgtgtttgttgaaaagaacagaagtcttcagtcatttagaataaagctggcccatcaacccctgtgggaagaaaagaactatttattttatccgttaatcccaaatacaaacacaataaagctgtcttttctaatagtgacctatttcatgttaaattgggataaagctagctttgctcaataagactattgttgtcaacaaaaaagtcaatcttattaggattcccattgaataacttccaataacttatcttttaaaatgctaaacccaaatcccagttgaattctctacgttgtctgcaaatcgggaaaggaaataacctcaaccggtgagccccatctagtgtcagggaagtaaattgctggtcagaaaccgggtctataattttttcttatctttaatctgatttttaagattcttctatttgtgcccaaacccttatgtttttgtttctttctggggtttatttgcctatatttttatttctaaaactaaacaactttctataccaagcacattttttcttgataacttataaaaatacaacattgcttaaaattagccagatttccccattggttttattttaaaatattaattttaaaacgtggacagtcatgttccttgaatagcattacagagcactcatgtactaaactatgtttgatgtaaacaatattattcacttatcaattttattttatcaaaagaccccaaaggatctttcttgatatgagttttagaggagcaagaccgagtcacagaaaaatccaatggaacatctaaggacattgaagatttcgaagtctactttcttgggcaacatctacatttgaggattgtattggcttggaggtcagtttcttttagccaactacatcagagcttaagtgcagtgtgtctgccttccacgcttctgcatttctcgactgttaataaacatgtcaaaaacgagtaaggcaagttcagggcttagctccagtcatacatgggaaatgcctttgctaataattctgccttataaatgcaaaccttctttgttcccacacacacaaaaaaacttgacaatagccaaatgaagtagaacatattcctcaatttatctacacttaagatatttcaaaatatctttccactagcctatgtgctcaaaccacaaaagcagacataggtatatagaggtatctgggttatggaggaaagaacaaaggactgaagttcaaatactaacattgcccttcactggctgcatgtccttgggaagccaaatctcccaatagggtgccatgagttcaggctatggagcagacaatccctgtttctccacctcccagctgttagactttagacaaattatttctctaagccttgacttcttcatctatcatgatatttacttccttcatacaggaagattgttatgaagactgactgataaagtatgtgaagtgtgtagctcagggtctggcacataacagagtgctcagtgaatacgactatgactcacaaatggagggacaagcgcccacctcacaagatggtcgggaagactctaagacatgggaaaatgttggtcaactttaaggcactctatcaatgtaatgagttaggcaaacctagtaggcccctcctagaaggcctaaaattaaaaagagagctgttgaaattgaagaacatggggctttcataggtcagcacaagctctgtgagctgaacagaagttttgtaggtctaatgatttgtattgttggcttacattgtatttggggttgcaaatttttgaaaagaagagaatgatagagttggaagggagattgtattaatttagttttcttgttttattgaggaaaaaaacctaatgtcccttccttcttcagaactccttgcacacttgagatcatttaagaatttcaaagtatttgtttaatgtctgcttttgctccgactgtaagaaccatgtattcaggggccatgtctatttgggctgcactgtatcttcagatgtggctctgtgtccagcagtgtctagtagtgtctagtaccttgtctacacatggtaattgcagacaagctcaaaactgccatatagcaaagtacataagggcatggactcctcagggaggaaaggctggacacaaattggacctctctggtttacttcccgtgtgactttgggcaagctacttagcctctctaagcctcagtttccttgcctataaaacagaattaataatgacagtacctatttcatagggttgttccagagctttatgagctaattcctgtaaagtgcctggaatggtataattctgtaaatttacctaaatgaccaagatagcaaagccaattagaaagtgttctggaactaaaaccctacctaggtcttgctctttatttttttttcccctccatatctttcaaaccctctgcccagaccacttttccaaaccattaaatctatcagataaaaacagcaatgcaaaataaagtattggttgattcactcagaggtgctgcaggccttccaagtctagcagcaagtttcaggaactcatttcaatggtgttaagaggcttatgattgctaataacttcccagtgtctaaagcacagagctgaacagagtatttcatattttgctctaacagctagtccttaagggtttgactatcagatgtaggcacgctagattatgaaaatggcacatttaaaaatatctctgcacctcactcctagatgacttttagcaggtgaactaactgttagcctcctggaagattagatgtcaggataattagctctctgccacataggctatctacttttcaaatcttattctcctttcttccctatgtctcttagtagacgcaactcattattactttatgcctgagttttcccctttcttttcagcacactcataaaccacctccttgtcatgacttatttcacactcaattcatactgttagctttgatgttctcttttacaattcagtttgtattcagataccagagaaaacaaagagcaagttagacaggtaaaccagataacaagtattacctatgatgacccgttctcctatctctccttggtcttcaaaattccatgtgctgtggaggaggtaaaatgcacattttcccatttcatggcatgtccagaggtctgtgagtttcttgtttcattgtctaacattagggtctctgagctttcccatttcattattctgtacgacctggactcggccttatacaactggggaataacttttgcttttctattacaaacggagccaatgaaaaggtagactgaaaaagagtaagatggagtggagaattcaccaaaggaaccatataattatagaaatttctggctagaagaaatttgaaaggctctctgttcacctccctgcactttagctctaccccataccaatgggactggtaattatggcttctatttcaaaagacttcacaggatccatgcctctgccttccatttaagacagttcttcatgtatgcagcaaataccttctcctcttctagttcaaactcttgtctttctattgttaggaagaagagtttgttagtttaatgccacctagaaatatagatgtccaacaggtagaaaggagagactacttcacttctcagcttccttcctcacctacaacccgtaggctttgctctccagcttctctgggtattgctacagtttgatttattgtgaaaactccaggatttcctgaaaatggtctagaactgagccagtgtttgaagtacaagaaaagagaatgaggaatatttcctcccttttcgctttcctttgtcagcattgttgtaccatttcttaggggctcactacttcctcaccccaccccaccttcacagctcagaaaatgtggggcaaaatccaagtcctatgaaactgcccttaggcatatgcccttagctctatcccaaatccagatcttctcaaaactataatgaagggcttagagtcctaagggccaggagatttctaagacttgtagacccaggaattgctacctagtgacctaaaactgtcaggaaattccccctacttcactcccatctgcaatcttgactacaggttccttaattttttttttttttaatgctgagcatgacttgatagtaacttgctgggctattttcaacacacatctatcttagtttttgaacaccagtgatcagcctattgaactttaagtggtctggcaacatgtgtaatgaagagcagtagtttaggggtcaggctgaccttggtctgatgctccactatttcatttactgttgaatgacttttgtcagattgcttaacctgtctaagcttcaggttctttctatgtaaaatggagctgatgcagacttcagggtttgataagaagattaaagagagaattgatgtatgtaaagcacccaacaccgttcctggcctgcgctaattgtttcaaacacatttatttctctcccctactggataaagggcaagagctatagcacctaaggcatttagtggcttcattagttaaactgagctgacttaatagcaacattcactggaattgttaataacagaaatagcaacttgctgtcatagagacttaataacagtctctattgtgtacttgctgtgtgccccatattgttctgggtactgaagctagaaaggcagtagggcatagggttcctgtactcatgaagctcagaatgtagaagcatctggcatatgtgggccacttcatgaacatgtaagagtcacatcaggattggcttaagattttagaagacctaagcactaaaaaaattacagtgctgccacctccatatataattaaaaataaaaacagtattaagtcataattaagtgtaaagaagcagaacaatgctccaatatttttcctactgtgataactgtcttattacttcttttgaaatatcaatttttaaattatttttttcaaagtgatattttttgaggtgtcctcattttgtaggtaactagtatacttacatagtaatctagccctggccccacaacattaccccaagggctctcctcatgttccctgaatggatcagaagctagaacaatgcagagaagccaggggtcttgaccattcataaactatttggtaaattccacaaagaataaaaaagtaattgaatattttgaggcaagatcaaatcaccttataaaaaagtaaaaagtaaaaaagcactggctcagttctagaccattttcaggaaatcttggagttttcacaataaatcaaactgtagcaatacccagagaagctggagaatttgaaattctttccaaacatatggaatatttttctctggaatggacttttaaaaatgcacaaatgggacataggagcagttatatttagaagagcacattgtggagacaattttatgttatgtcttaaaggactagctcactgctcagctacttaccccagctctgttcttataataaagataaaatgctgagaacagtggttgcatgagacattcaccaggatgcaaaggtactcttttttttttctcagttcctccctttctttaagagatgttttctctgaaggccacagtctggccgtaagcaagtttggcagtacgtggggaggcttacctgaagatctagctgacaaccactgacatttggagccactcacctttatactgcaaatctgaaagataagcaacaagaaagacctaaaaacaatgacagaactttctcaagcacagacaaaaacaatttacacagccactgtaaatagttaataaaatccattttatagtccatctacatagatttccattacatcctgttctgtttcacacatgcatttttcttttggattgttaggcaataaagagtcaagtcatttatcatgtagtgtcttagtatttctttaaaatgttttaccattttcaggaaattctgtggcttctataattaatctcccagtagaagctgttttagaaagactccagaacaaccgaaagaagtcttttctttgtggaattgttttgggtcttgtgagtggaaacattcagaaacagatgccagtggtattatcacatattgcaaactgttcatttaagataatgaggatgaaaacaatagagttcagtctcactcttgcaaaactgccctgtgacaaagctgttgttaaatggggtccacaattaactccatgatatgctataattagagtaactctacagtgtaaacctgggtttccacagttcttataccctagatgggtacaataacacttggtagaagtaatgaggagggttcccacccactaaccccttccctgcttggcattagtaatactagttactacttagcactttccacatatcaggcattgttctaaacatttttacacatattggttcatttaatactcacaactttctgaggaaggtgctgcattatcctaatttttatattaggagactgatatacaaaatagttggaggatttgccaagggcagacttctcaaaggctgaggcaaggagcagaactcaggcagcctggccgcccagtcaagcccctcagctgctgtactctgtggcccagcatggtatatacaatgttcggtgctctgttctcacagtctaatttgcactagtacatggtcaggtagttcagtcatctcattttacagaagagaatacaaaggcaaaaagatgctaagtggctttcaaaaactcaaatgcatgatggttacagggctgggcatggtgactcatacctgtaatcccagtgctttgaggcccaaaggcaggaggactgcttgagcccaggagtttgagaccagcctgggcaacatagtgaaaccctatctctacaaaaaattctttaaaaaacttagccaagctagtagtcctggctacttgagagggtgaagcaggaggtttgagactgcagtgagctatgatcacgacattgcactctagcctgggcaactgagacctttcttgatgaaaaaacaaaaaaccaaaaatgagatggttgggagctcagattgcctgatgtttagccaacgctttctactttagagcattgtatcatctcctcattttcccttttcacataaaaaaaaaaaaaagaaaaacacaaaatctaaactgttgctttatttttttctgtgattcatcctcatgggtcacaagaaagagcagaagtttcgttggcctgtatgctaagaacagcaaaccccactctgggcccacgttctatccaatgcagcactggctttgcttcttgaaggcaaatgagcagttttattggcttcatcctcaaattatggttttaaaatagtttaatctcacacttgggcagattaacaagtactaggaagtgtccccaactgtagggtgtatctatgcaagagatcaagaatcatacttatttttttcttcagtgtcaaggtaacatttttgtttgttccactttgttttttaacagggttataccaagtgtgggctcaggtggttttgggggcaatctgacctccagattaacctcattctgaagccagttaggcgtcgtttcttctgcataaccacctgatgcgcttatttcacagtgttttcttcctaaatgaggaggaaactggttgtgacgaaaccacaggcaatgcagagcacaggtgggatttaatctttcacaatgtcacttgattaagcaggcaatcatcttcgctgccatgcctgcaaggaaaatttcaagtcatgtgaatgcttatctcatctgtattagtcagagtgcacaagatcggagatggtatatgcaaaataggtattaaatttagggtatttaataaagggactatttataaaaatagaagcgggtggaggaaaatacacaagagatagtggagtatcccaaggctagcccgagcagggagccatcaactgtagacttaaagagaaaagttatagggattggagagagagctgcacatgataggagccatggcttcccagaaagacacagacacccacagtaacccagcaggaaggaagccaagggaatggatactgtagcctcaaccctcctcctgcccattgaccaaattcaaccagaggacaaggtacctattgaggtggtccaagggggaccatctcctagggcctggtgcaggggatggggcagaggaaagacacccaacacaccctcacactaaattctgaggtaaaataacttcaacgtcccctcctgctgtgacatgtgtagtttaataaagaagtaattacgaaaaacaacaacgatgtggaattaggtggctaattttatgcctatgcctatagcagaaatcagagttgtaaattcctcattgtgttttatgagtcagaactggatatacacaaagggtctcaggaaaaccctgggcctcaaaataggccctctgataacagggcaaggagagccagtggaaatcagttcctaccaagaccatgagcacaatcaaaattaaacagaaacatagatttaagaaaagatcacaggggcttgcaatttttggcctaaaatctatggaggcacccattgcattgaaaggcccatgttttaatggaataaatgaaacttggttttgttttgtcctacatggctttgtttagtttcctttagtggtttaggcaaaaggtcagccagaggaaggagaggtggggaaatttgaagatgtgtcctgtggacaatttagagatggcagtgatgcccagagtaaactaggatataaagagattatagtgaacccagttcccagccatgtaataagagcaaagacatttggtgtttggataagagaatggtgtggtgttagaagcaaagatttggagtcccagattgttgcgggaagtcaggtaccccaaacggagggaccatgggactagagaagccatggcagaagaacacaaattgtgaagatttcacggacatttattagttcccaaattagttcccaaaattaatacttttataatttcttacacctgtcttcactgcaatctctgaacataaattgtgaagatttcatggacccttatcacttccccaatcaatattcttgtgatttcctacgcctgtctttactttaatctcttaatcccgtcatctttgtaagctgaggatgtatgttgcctcaggaccctgtgatgattgtgttaactgcacaaattgtttaaacaatatgaaatctgggcaccttgaaaaaagaaaaggataacagcgatgttcagggaacaagggagataactattaggtttggctgcctgagagctgggcggaacagagccatatttctcttctttcaaaagtaaataggagaaatattgctgaattctttttctcagcaaggaccagccctgagaaagagaatgctttcctaggggtaggtctctgaaatggctgctctgggaatgtctgtcttttgcagttgtagataagggatgaaataagccccggtctccaatagcactcccaggcttgttaggatgaggaaatagctgcctaataaattttgatcagacaggttgtctcctctcaaaccctgtctcctgataagatgttatcaatgaccatgctatcaatgaccatgcatgcccgaaacttcattagcaattttaatttcgctccggtcctgtgatctcaccctgactccatttgccttgtaatattttattctcttgtgaaggatgtgatctctgtgacccacaccctatttgtacactccctcccccttttaaaatcactaataaaaacttgctggttttgcagcttgcggggtatcatgaaacctgccaacatgtgatgtctcccccggacacccagctttaaaatttccctcttttgtacactttccctttatttctcagactgaccaacacttagggaaaatagaaaaggactcacattgaattattgggggcgggttcccccgataccaaatatactacctattagctgggtcaccttgagcaagttagataatctctataagcctcagtttcttgctcaatttagataatctctataagcctcagtttcttgctcagtgaaatgggaaaaatacctacctctcctctggttgttttgtgaattaaataaaatcatgtgtttaaaatccttaccatggttgggtggctggcaagatgggtgaatacaaacagctctggtctgcagcacctagcgagatcagcacagaaggtgggtgatttctgagtttccaactgaggtacctggttcatctcactgggactggttagacattgggtgcagcccacagagggtgagccgaagcagggtggggtgtcccctcacctgggaagtgcaaggggtcagggaactccctcctctagccaaggaaagccatgagggactgtgccatgaggaacagtgcattccagcccagatactatgcttttcccatggtcttcacaacccacaggagaggagattccctagggtgtctacaccaccagggccctgggtttcaagcacaaaactagggggcagtttgggcagacactgagctagctgcagaagatttttttcgtaccccagtggcacctggaatgccagtgagacagaaccattcactcctctggaaagggggctgaagccagggagccaagtggtctagctcagcggatcccacccccatggagtccagcaagctaagatccactggcttgaaattcttgctgctagtacagcagtcttaagtggacctgggatgctctggcttggtggagggagaagccacgtccaccattactgaggcttgagtaggtggttttccctcacagtataaacaaagccaccagcaagctcgaactgggtggagcccaccacagctcagcaaagcctctgtagcctgcttctctagtcctcctctttaggcagggcatctctgaaaggaaggcagcagccccagttaggggcttatagataaaactcccatctccctgggacagagcacttgggggaaggggcagctgtgggtgcagcttcagcagacttaaacatccctatctgatggatctgcagagagcagtggatctcccagcacagtgctggagttctgctaagggacagactacctcctcaagtgggtccctgatccccatgcctcctgactgggagacacctccctgcaggggtcaacagacatgtcatacaggagagctctggctctggcaggtgcccctctaggatgcagcttccagaggaaggagaaggcagcaatctttactgttctgcagcctcctctagtgatacgcaggcaaacagggtctggaatggacctccagcaaactccagtagacctgcagcagaagggctgatggttagaaggaaaactaacaaacagaaaggaatagtatcaacatcaacaaaaaaggaagtccacaaaaaaccccatccaaaggtcaccaacgtcaaagaccaaagatagataaatccacaaagatgaggaacaaccagcacaaaaagcctgacaattccaaaaaccaaaacacctcttctcctccaaaggaacacaactccttgccagcaagggaacagaactggacggagaatgagtttgatgaattgacagaagtaggtgggtaatagcaaagtcctctgagctaaaggagcatgttctaacccaatgcaaggaagctaagaactctgaaaaaaggttagaggaattgctaactagaataaccagtttagagaagaacataaatcacctgaaggagctgaaaaatgcagcatgagaacttcatgaagcgtacacaagtatcaatacccaaatcaatcaggcggaagaaaggatatcagagattgaagaccaacttagcaaaataaagcatgaagacaagattagagaaaaagaattaaaaggaatgaacaaagcctccaagaaatatgggatatgtgaaaagaccaaacttacatttgattggtatacctgaaagtgatgggaagaatggaaccaagttggaaaacactcttcagggtattatccagaagaacttccccaacctagcaagacaggccaagattcaaattcaggatatacagagaacaccacaaagatactcctcgagaagagcaaccccaagacacataattgtcagattcaccaaagttgaaagacaggaaaaaatgttaagggcggccagagagaaaagtcgggttgcccacaaagggaagcctatcagactaacagcagatctctcagcagaaaccctacaagccagaagagagtggcagccaatattcaacattcttaaagaaaagaatttcatatccagccaaactaagcttcataagtgaaggagaaacaaaatcctttacagacaagcaaatgctcagagattttgtcactaccaggcctgccttacaggagctcctgaataaaacactaaatatggaaaggaaaaaccagtaccagccactgcaaaaacataccaatttgtaaagaccatcaacactgtggagaaactgcgtcaactaatgggcaaaataaccagctagcatcataataacaggataaaattcacacataaaaatactaaccttaaatgtaaacaggctaaatgcctcaattaaaagacacagactggcaaattgtataaagagtcaagacccatcagtgtgctgtattcagagacccatctcatgtgcaaagacacacataggctcaaaataaagggatagaggaatatttaccaagcaaatggaaatcaaaaaaataaaaaataaaaaaaagcaggggttgcaatcctagtctctgataaaacagactttaaaccaacaaagatcaaaaaagacaaagaagggcattacataatggtaaagggatcgatgcaacaagaagaactaactatcctaaatatatatgcacccaatacaggagtacccagatgcataaagcaagttcttagagacctacaaagagacttagcctcccacacaataatagtgggagactttaacaccccactgtcaatattagacagatcaatgagacagaaaattaacaaggatatccaggacttgaactcagctctggaccaagtggactgaatagacatctatagaactctccaccccaaatcaacagaatatacattcttctcagcaccacatcacacttattctaaaattgaccacataatttgggtctttttttactttaaaaaattctgcttgaacaattaatatatgcttcatttaactttaaaatattctgaacttagattatcataacaaagtctcagatggttcatttctcttccatcctctcatctcatctcacaaattgctttgttgtgaaagtgacatttttttccaaagttctgacatgatttgggatgacagaggtcagaaatttgtgcttaattttgtttgttgcgttttaatttggccagaattgaactaaagatttcaattgagctattatattgttagttctacttattactgactgaaaaatgaaccttagtctattcatgactattggtttaaacatgttattatatattcttaatatttttaagggctcttaaaatgtggttgccttagatgattaaagaaaatgcaaaagggttcaacaattctgccagctgcttagaaattttacttttaggctcatatccttgaaaggtattgacccctataaacagctaatgatggaaaagttgacaggacagtttgacctcctaattgtattctgtgcatcatgcatttgaccttctggagacaacttgatgagtttctgccatgttaattactccacactgttttgcagtgatcctttagcaattcaaacctagtgaatgagtgcatgaacttttctaggctctaagaaaggattgaaaatggtaatttaaaagcacccgacataattttccgctaccaggcttgttttcttctcctgaaatgatgaacaaagacctctgaaatgatcttgtatttattgtactcttttacttcttgcaaattttaacaccttctttcaaaaatacatttgaagccccagggtcttatcagggatgctcttcttttccttcaattactatgcatttggtaatcaatatgtttattactaggcaatattacctgtgatgcctgagtcttcttgactttgtcttaagagtcattaatgagatctaatgtgcaaagcgtcatttaattttcggttcctaaacattctttgtctggggttgagctttgtcttcctaatgaactagacaacagtcattattgctgacagatctcctctcctttccagtttgttaggctacatagtttaagctttccctctttctgtcctttgtgtgaagcaggaagtcacctttgtgggtcattttcatccccctgctctcaggctccttcatgaaacattttgagccatttcagaattagacctgcacattccaatggctgtatttaaaagacaatttatagctcagctcattctcatgcactgcatgagagtattataagaaagtcccctgtgtcaaagtttcatctagaatcgaactttttcctgctccctgtctttctcctatcactagttaggtcttttttctttctttctttctttttctttttaaaaaaatatttgatgagatagaatttcagtatgttgcccaggctggtctcaaactcctaggctcaagaaatcctcctgcctcagcctccagagtagggattacgggcatgtgtccctgcacccagccctagttaggtctgattcagcaaactatatctctagccatattttctttaatagcaaaatgtgattggaggggagtcagataatctagatggagtttcagctcttccatttatatcactgtgtttgtctagtgtgtgtgtgtgtgtgtgtgtgtgtgtgtgtgtgggtgtactgagtatatgctttgtgccaggtgttacattaagcaatttacacttaatccatacagcaatcctgcaaaagaggtacaaggatggatactttgcagatgagaggtggctcagagggtttaaatgattcattgaatcaagtttaaataacttatctacgtcagtactagtggacctgaaattaaaatgtggctttacctgtctccagagaatgggcttttaaccaccgcaccatactgaaagtcttacacaggtagtcagggcacttggcttgttggtatctgcactgggcacgttgagagtcagtggttgagaactcagtctctgaagtcagactgcctatatttgaaatctgtttccttcactaactaattgtgtgacagtgaacaagttattttacatttctgtactttagtttcctcatctgtaaaatggggaaaaaataacagcaacaactctttgggtcacatgaaggattatattcatgacacatattaggtacacttttaaagcaacaatagtaaaatcagtttaataaacgttagcaacaattattatttcaaaaaaatttgacgtgtactctaggtgattgctgtaaggatgctggttgaggccttgaaggttttaaggtactctgttgttgtatattgttgatcaaagcctcttcctcttgttcctcagactaagataatggcagaagagcacttggggaaaattggatgttggatgtagacactgggtgtgggatctaaacagcaggagtgatgtgctgtccttcatcctctgcaaaagttgtgtggttaagtggataataccaggagaaggaattaagaaatttggcttctatcaacctatcctgtgagctccttatccaaaattgagtaattaatacatccaagctcaagagcattatcatttctatgaagaggaggataccatatctatgcagcctaatttcagggagaaattggaaagcagcaaacaaagttaaacattaaaagaacaacaacagctttttatcatcaaatggactctcctctaggcagcatgaaatgaatagcaccaagctagacaggtagctgctagggaataatgaaatggacatccagctatcagtaggatgcctactatgggctggacgttgtgcatggcatcatacaaagatgtctaagaaacaaaattccgtcttataagggagagcaatttgcttgtaaggcaagctattaaaaaataactaataatagaggagtttctgcaaaggatgagtggtgcaaaccagaagtctatggagaaaatcttcccattatcaacaccagcaacaccattcaattctgagcaggacttggttgggcaagtttgttctcaatattcaaaagcctgtaaacatttacatagaattcttaagatttaacctaaactcattttttaaagttaattttaattcctctggatgtcatagttccctctgacaacttatcaaaagctctggaccatctgtcaggaaactgcgtggaaactgcaagggtctgcatgtaattgtaaatgttgacagagctcctaaaagccatctatgatccccaagttaaaaacccctgctctacgaaagagggagcaacactgttatagaaacttaagttattcatagttgcccaaatcttaccagatctcagttacttttttggcttagcttttgctgttgtaaataatactgtagttatgattcttggaattaaaatgtcttttttaaaaaaacaaaaaccaaaaagcctcagatctcttccatacacagtgtaacagaaattgctactttcccctcagtgcccattgtctgtttgttccatagaaatagaatttttaactgggcatgtggctgtccaaaatgaagactacactttccatccactctaggcatggccatgtcactattttagccaatgaatgtcgataggaatagtgatgctgcaacagaaccctcctcaatagacagttgaaatgtgtccttcgctgcttctttacctgttcctccatcctgtggttgggagcatggatgtgatggccgaagtgctttcttgggctgtgtgacatgggacacatcctggacaccacaaatctgaaagatggaagtgacctagatccttaaggaacatagaaaaaagctaacataacagttgataatcttctagattctgatgcgaaagaaaaataaaattgtttaagtctctggttgtttaagtcactgctatttggggtttttctgtaacttgtagctgaactgaattctaatttacagacataatacttcgcgtttgaagcagcaattcccttgcttcctgttatctatcatgactaatgagaagggtgatctgtctgatagcttttaagattaccactttatatggtgcattttctcttcagtgggtggatttattttcatttatcttgctatgcccttgatgtttcttaggtctcatatcctttaaattctttgccattactttttggattttgtagcttcaaatttcctctatcctcctcttctgaaattcttactggaaatatgttataggctcacaatcaaatcttcatgtaccttaactgcacttttaacctatttaaaaatcttaacattgcatgctgttctttagttttatcttctaaattcctaataacctcttgactcaaccacctagagtttattctatctactgagttttttctttgcattttctttatttctgttctttctttctttctttctttctttctttctttctttctttctttctttctttctttttttgagacagaggctcactctgtcactcaggctggaatgcagtggcgcaattttggcttacttccacctccacctcccgggttcaagcaattctccagcctcagcctcccgagtagctgggattacaagtgcatgccactacttctggctaatttttaaatttttagtagagaccatgtttcaccatgttggccagattggtctcaaactcctgacctcaagcgatccacttgccttggcctcccaaagtgctgggattacaggcatgagccaccatgcccagcctatttctttttttaattaaaaatttaagaggcacttccaagacagccgaataggaacagctccggtctacaactcccagggagattgacacagaagatgagtgatttctgcatttccaactaaggtacctggctcatctcattgggactggttggacactgggtgcagaacatggaggggcaagctgaagcagggaaggatgttgcctcacttgggaagtgcaaggggtcaggggatttccctttcctagccgagggaagccatgagtgactgtacttggaggagcagtacactcctgtacaaatactgcatttttaccacagtctttgcaaccagcagaccaggagattccctcccacgcctggctcagtgggtcccatgcccacagatccttgctcactgctagtgcagcagtctgagatcaatctgggatgctggagtatggcagggggaggggcgtctgccattgctgaggcttgaataggcagttttatgcccacagtgtaaacaaagccgcagggtagctcgaactgggcagagcccactgcaactcaacaaggcctactgcctctctagactgtctagggcatatctgaaaaaaaggcagcagacagcttctacagacttaaacaaccctgcctgacagctctgaagagagcagtggttctcccagtatggcgttcgagatccattaatggacagactgcctcctcaagtgggtccctgacccccgtgtagcctgaatgagagacacctcccagtaggggctgacagacacctcatacaggcgggagaccctctggaacaaagcttccagaggaaggatcaggcagcaatatttgctgttctgcagcctctgctggtgatacccaggcaaacagtgtctggagtggacctccagcaaactcgaacagacctgcagctgaggggcctgttagaaggaaaactaacaaacagaaaagaatagcatcaacgtaacagaaagggcacccacaccaaaaccccatgttgcaggaagtcagggatcccaaatggagggactgactggagccacggcagaggaacatgaatggtgaaaatttcatggacatttatcagttcccaaataatacttttataatttcttatgcctgtctttaatttcttaatcctgttattttcgtaagctgagtatgtacgtcacctcaggaccactgtgataattgtgttaactgtacaaattgattgtaaaacatgtgtgttcgaacaatatgaaatcagcacaccttgaaaaagaacagaataacagaaacttttaggaaccaagggaagacaaccataaggtctgactgcctgcagggtcaggcaaaaaacctctatttttcttcttgcagagagcctataaatggacgtgcaaataggagagatatcactaaattcttttcctagcaaggaatataaatattaagaccctgggaaaggaatgcattcccagggtgaggtctataaacagccactctgggaatgtctatcctatgtggttgagaaaaggaccgagatacaccctggtctcctgcagtaccctcaggcttactagggttgggaaactccgccctggtaaatttgtggtcagaccagttctctgctcttgaaccctgttttctgttgtttaagatgtttatgaagacaatacatgcaccactgaacatagacccttaggagttccgtttttgccctttgccttgtgatctttgttggacccttatcagtagttctgctttttgccctttgaagcatgttcaaaggccctgttcatacaccccctccccttttgaaatccttaataaaaacttgctggttttgaggcccaggtgggcatcatggtcttactgatatgtgatgtcacccccggcggcccagctataaaattcctctctttgtactttttctctttatttctcagccagctgacacttacgggaaatagaaagaacatacattgaaatattgggggcgggttgccccaataaccccatccgtaggtcaccaacatcaaagaccaagggtagataaaaccactaagatgggaagaaaccagagcagaaaggctgaaaattccaaaaaccagaacacctcttctcctccaaaggaacacaactccttgccagcaagggaacaaaactggatggagaatgagtttgacaaattgacagaagtaggcttcagaaggtcggtaataacaaacttctctgagctaacggagcatgttctaatccattgcaaggaagctaaaaaccttgaaaaaaggttagatgaatggctaactagaataaccagtgtacagaagagcttaaatgacctgaaggggctgaaaaccacagtatgagaacttcgtgaagcatatacaagcttaaataactgattcaatcaagcagaagaaaggatatcaacaattgaagatcaaattaatgaaataaagcgagaatacaagaatagagaaaaaggagtgaaaagaaatgaacaaaacctccaagaaatatgaaactatgtgaaaagaccaaatctacatttgattggtgtacctgaaagtgacggggagaatggaaccaagttagaaaacactcttcagaatattatccaggagaacttccctaacctagcaaggcaggccaacattcaaattcaggaaatacagagaacaccacaaagatactcttcaagaagggcaccctcaagacacataattatcagattcaccaaagttgaaatgaaggaaaaaatgttaagggcagtgagagagaaaggttgggttatgcataaagggaagcccatcagactaacaggggatctctcaacagaaaccctacaggccaggagagagtggggaccaatatacaacattcttaaagaaaagaaattttggctgggcgtggtggctcacagccataatcccaacactttgggaggccaaggtgggtggatcacttgaggtagggagttcgagaccagcttggccaacatggtaaaaccctgtctctactaaaaaaaatacaaaaattagctgggtgaggtggtgcaagcctgtagtcccagctactcaggaggttgaagcaggagaatcacttgaacccaggaggcagaggttgcagtgagctgagatcgtgccactgccctccagcctgatgacagagcaagactctgtctcataagaaaaaagaaaaagaattttcaacctagaatttcatatccagccaaattaaccttcataagtgaaggagaaataaaatactttacagacaagcaaatgctgagagattttgtcaccaccaggcctgccttacaagagctcctgaaggaagcactaaacatggaaaggaacaactggtaccagccactgcaaaaacatgccaaatagtaaagaccatcgatgctatgaagaaactgcatcaatgaacgggcaaaataaccagctagcatcataatgacaggatcaaattcatacctaacaatattaaccttaaatttaaaagagctaaacgccccaattaaaagacacagactggcaaattggataaagagtcaagacccatcagtgtgctgtattcaggagacccatctcacatgcaaagatacacataggctcaaaataaagggatggaggaagatctaccaagcaaatggaaatcaaaaaaataaaaaataaaaaaagcaggggttgcaatcctagtctctgataaaacagactttaaaccaacaaagatcaaaagtgacaaagaagaccattacataatggtaaagggatcaattcaacaagaagagctaactatcctaaatatatatgcacccaatacaggagcacccagattcataaagcaagttactagagacctatgaagagacttagactcccacacaataatagtgggagactttaacaccccactgtcaatagtagacagatcaatgagacagaaaattaacaaggatatccaggacttgaactcaactctggagcaagtgaacctaatagacatctacagaactctccatcccaaatcaatagaatatacattcttctcagcaccacattgcacttattctaaagttgaccacataattggaagtaaaacactcctcagcaaatgtaaaagaacagaaatcagaacaaactgtctctcagacaacagtgcaatcaaattagaactcaggattaagaaactcactcaaaaccacacagctacatggaaactgaacaacctgctcctgaatgactactgggtaaataacaaaatgaaggtggaaataaagatattctttgaaaccaatgagaacaaagacacaacataccagaatctctgggacacattgaaagtagtgtgtaaagggaaatttatagcaataaatgcccacaagagaaagcagaaaagacctaaaatcaacaccctaacatcacagctaaaagaactagagaagcaagagcaaacaaattcaaaagctaacagaagacaagaaataactaagatcagagcacaactgaaggagatagagacacaaaaagcccttcaaaaaatcaatgaatccaggagatgtttttttgaaaagatcaacaaattgataggttgctagcaagattaataaagaagaaaagagagaagaatcaaatagacataataaaaaatgataaaggggatatcaccaccgattccacaaaaatacaaattaccatcagagaatactataaacacctctatgcaaataaactagaaaatctagaagaaatggataaattcttggacacatacaccctcccaagactaaactaggaagttaaatctctgaatagaccaataacaggttctgaaattgaggcaataattaatagcctaccaacgaaaaaatccagatggattcacagccgaattctaccagaggtacaaagaggagctggtaccattccttctgaaactatttcaatcaatagaaaaagagggaaccctccctaacttattttctgcagccagcatcatcctgataccaaagcctggcagagacacaacaaaaaaaagagaattttaggccaatatccctgatgaatatcgatgtgaaaatcttcagttaaactactggcaaaccaaatccagcagcacatcaaaaagcttatccaccacaatcaagttgacttcatccctgggatgcaaggctggttcaatatatgaaatcagtaaacgcaatccatcacataaacagaaccaatgacaaaaaccacatgattatctcaatagatgcagaaaaggcctctacaaaattcaatagcctttcatgctaaaaactctcaataaactaggtattgatgaaatgtatctcaaaataataaaggctatttatgacaaacccacagccaatatcatactgaatgggcaaaaactggaagcattccctttgaaaactggcacaggacagggatgccctctctcaccactcctatttaacataacattggaagttctggccagggcaaccaggcaagagaaagaaataaagggtattcaatgaggaagaaaaagaaataaagcgtattcaattaggaaaagaggaagtcatattgtctctgtttgcagatgacatgattgtataattagaaaaccccatcgtctcagcccaaaatctccttaagctgataaacagcttcagcaaagtctcaggatacaaaactcaaaatgcaaaaatccaagcattcctatacaccaagaacagacaaacagagagccaaatcatgagtgaactcccattcacaattgctgcaatgagaataaaatacctaggaatccaaattataagggatgggagggaactcttcaaggagaactacaaaccactgctcaatgaaataacagatgacacaaacaaatggaagaacattctgtgctcatagatgggaagaatcaatattacaaaaatggccatattgcccaaagtgatttatagattcaatgctattcccaccaagcttcacagaattggataaaaactactttaaatttcatatggagctaaaaaagagcctgcatagccaagacaatcttaagcaaaaagaacaaagctggaggcatcatgctacctaacttcaaattatactacaaggctacagtaaccaaaacagcatggtactggtaccaaaacagatatatagaccaatggaacagaacagaggcctcagaaataacaccacacaccacacatctacaaccatctgatctttgacaaacctgacaaaaacaagcagtggggaaaggattccctatttaataaatggtgctaggacaactggctagccatatgtagaaagctgaaactggatcccttccttacaccttacacaaaaattaactcaagatgaattaaagacttaagcatgagacctaaaaccacaaaaaccctagaagaaagcctaggcaataccattcaggacataggcatgggcaaagacttcatgactaaaacaccaaaagcaatggcaacaaaagccaaaatagacaaatgggatctaattaaactaaagagcttctgcacagcaaaagaaactgtcatcagagtgaagaggcaacctacagaatgggagaaaatttttgcaatctatccatctgacaaaggactaatatccagagtatacaaagaacttaagcaaatttacaagaaaaaaacaactccatcaaaaagcgggcaaagaatatgaacaaacacttctcaaaagaaaacatttatgcagccaacagacacatgaaaaaatgctcatcatcactggtcataagagaaaagcaaatcaaaaccacaataagataccatctcacaccagttagaatggcgatcattaaaatgtcaggaaacaacatgctggagaggatgtggagaaataagaacacttttacactgttggtgggagtgtaaattaatttaatcattatggaatacagtgtggtgattcctcaaggatctagaactagaaatattatttgacccagcgatcccattactgggtatatacccaaagaattataaaacatgctgctatgaagacatatgcacatgtatgtttattgcgcactattcacaatagcaaagacttgaaacaaacccaaatgcccatcaataatagactggattaagaaaatgtggcacatatacaccatggaatactatgcagccattaaacaggatgagttcatgtcctttgtagggacatggatgaagctggaaaccatcattctcagcaaactatcacaaggacagaaaaccaaataccacatgttctcactcataagtgggagttgaacaatgaaaacacatggacacaggaaggggaacatcccacaccagggcttgttgggggtggggtgctgggtggctgggggagcaatagcattgggagaaatacctaatgtaaatgatgagttgaagggtgtagcaaacgaacgtggcacatgtatacctatgtaacaaacctgcacgttgtgcacatatatcctggaacttaaagtataataatagtaaaattttaaaaaatactttcattgagagattgtaattgtacatatttatgtggtactatttgacatactggtacatgtatatattgtataatgatcacatcagggtagctagtaccattacctcatgtatatattatttctttgtgttgagaacattcaaaaacctctctgctacttgtatttcttatagacaacatacagttgagtcttgtttttgttttgtttttattccacactgaaaatctctatattttaattggtttattcaaatcattcatatttaaagagattattgatataattaggttaatgtctaccatgtttgtagctattttctatttgttgcatttgttctgtttcttttattttccttttatccgcctgttgtgggaagtcagcgacccctaatggacggaccagctggagccgcagcagaggaatataaattgtgaagatttcatggacatttatcagttcccaaaataatacttttataacctcttaggcctgtcttactttaatctcttaatcctgttatcttcgtaagctaaggatgtatgtcacctcaggaccactatgacaattgtttgaactgtacaaattgattgtaaaacatgtgtgtttgaacaatatgaaatcagtgccccttgaaaaagaacagaataacagtgatttttagggaacaagggaagacaaccgtaaggtctgactgcctacggggttgggcaaaaagagccatatttttcttcttgcggagagcctataaacagacatgcaagaagggaagacatcgctacattcttttcctaccaaggaatattgatattaatactctgggaaagaaattcattcctgggggaaggtctataaagggctgctctaggaatgtctgtcctatgcggttgagataaggactgaaatacgccatggtctcctgcagtaccctcaggcttactaggattgggaaactccatcctggtaaatttttggtcagactggttctctgctctcgaaccctgttttctgttgtttaagatgtttatcaagacaatacgtgcaccgctgaatatagacccttatcaggagttctgattttgcccttgtcctgttccctcagaagcatgtgatctttattctgctttttgccccttgaagcatgtgacctactccctgttcatacaccccctccccttttgaaatccttaataaaaacttgctgattttgaggctcaggtgggtatcacggtcctaccaataaatatgtgatgttacccccggtggcccagctgtaaaattcctctctttgtactctttctctttatttctcagctggctgacacttacggaaaatagaaagaacctatgttgaaatactgggggcagtttcccccgatatctgccttctccagttttaatcaagcagtttataattccattatatctcctcttttaccatattgcttctactttttaaaaaaagtacttttttagtggttgccctagagtttgcaatatgatgttttaactagtctaagtctaccttccaataacagtatactgcctcaggtgtagtgcagaaacatcataattgggtattccgaattcctccctcccatcttttatgatatggctgttatttatttcacttatccatatgctataatcaccccatacacatagtcgtcaatgtataatggttcaacttacaatttttctactttacgatagcatgaaagatatttattcagtagaaaccatactttgaacactgttacaactattctgtttttcactttcagtacaatattccataaattacattaaatatttaatgctttattataaaataagctttatgagatgattttgcccaactgtaggctaatgtaaatgttctgagcacatttagtgttggctaggctaagcgttgatgtttggtagtttaggtgtattaaatacatttcaacataatattttccttatgatgggtttaataggatgtaaccttattataaatcaaggaatatctgtacatggttactattattactttcaacaaataattattttaggccttttaaatatatgcaagataagaggttttatttctctttattaattccttctctgccattcttcctttctttatgtagatataaatttctggcctgtataattttcctccttcttgaagaacttcatttaacatttcttgcaaggcagatctgctgacaacaaatctcttcactttttgtctgagaaagtctttatttcttcatttttgaaggataatttctgtggatatagaattctatgttggtggggtttttatttccatactttcaatgtttcactccattctcttcttgcttgcatggcttctgtattagtctgctagggctgccattaaaaaaaaaatgccagactggtgctttaaacaatggcaatgtatttatttatttatttatttatttatttatttatttatttatttgcagtcctggaggctggaaagtccaaatcgagctgttggcagggtttacctctttgaggcctctctccttggcttcaagatggctaacttctcactgtgaactcatggggcttcctcctgtgcatgagtccttggtgtctcctcttcttcccataaggacaccagtcctgtggcattaggactccacctgtatcacctcacttaaccttaaacatctctttaaaggccccatctccaaacacagtcccattggggttgggcttcaacccaacctcaattgcacccgaattgcatgcaattcagtttataacaacttctggaaatagatctttggtaattcctatctttgttcctatacatgcaacatgattcttcccctctggcatctttcaagatttatgtttgtctttggtttcttgtaggttgaatatgctatacctaggtgttaatgttttgaaaattctcatgctgaattttctctaagcttcttagatctgtgctttggtgtctgtcattaattttggaaagttcttcattactcaaatctttcttcttctcctttctcttcttttctttctggtattccaattctgcatatgttacacccttttacattgtcctgcagtacgtggatattctgttcctctcccactcctttttctccttgaatttcagttagggaggtttcttttttttttttctttttctttttttttttttttgagatggagtctcactctgtcacccaggctggagtgcagtggcgcgatctcggctcactgaaagctccacctcctgggttcatgccattctcctgtctcagcctcccgagtagctgggactacaggcacctgccacctcgcccagctaattttctgtatatttagtagagatggggtttcaccatgttagccaggattgtctcgatctcctgaccttgtgatctacctgtctcggcctcccaaagtgctgggattacaggcatgagcaactgcgcacagccaggaggtttcttttaacatatcttcaagtttaccaattctttcctaggccttgcccaatctactgatgagctcagtaaaggcactcttcatttctgtcacaatgcttttgatttatataatttcctattgattccttcttaccatttatacttctctacatatatcactcatatgcccttgcatgttttcaactttttccattagagcctttaacatgttaatcatggttattttaaattctctgtctgattattccaatatctgtctcatattcaagtctggctctgaggcttgcttttgtctcttcagcattaatctggctaagaattgggctctgtttaatgttttctataactatagaagccagaggtttcaaattatttcagtattcttgtttttatcttccctctttacttatgactttcctaagtacttttcctcagagagagtgtgcattttgcagctcttttagctgtaagccattgttgttacattggagccctgtggaagtggtgggagggtgaaggagaggggaagagttttataatcttatgataaaatctcagtcctttagctgggtgtggtggcatgcacctgtagtcccagctacttaggaggctgaggcaagaggatcactttagcccaggaggtggaggttgcagtgagctgaaatcataccactgcactccagccagggtgacaaagtgagaccttgtctcaaaaataaataaataaatctcaatcttttagtgggcctctctccctgggctgagatcttcaaaggtatttctcagcaccctcccacttcttcccctcttagatgaaacaagagggatagaggaggctggaatgggagaaaagtcctcttcttcaccctgtcccatcctatcccttccattctgagccagggtatggctctgctaaagtctttcccctggaaaggaggcctttgtgtggaaaaggtccagaagtatttccaaagaattactctcccccttccttgtcagaaccacaaaggaatctttctcagatcatgaccttgagaatctggtggggttcctggagataaaatttacgaaattgtggggacctcctaagactgggcccctagactctctcactctcttgctagtccatactcagtcttcagcaattcaacaaaattaccgtaaaagtgtttttaccagtttataaatcccacatatcccactccagataatctgaaccctgaattcacctgtctctttagttctctgatggattcaggaaaagttgctaattttcagtttgtttagctgttgctggttgtaggaacagaagtgatgacttccaagcttgttatatgtcagagctgaaactggaagtcacttctgggatttctaagtgatttcttttaattcatctattctatttctttttatttgtttgtttgtttgttgagacagggtctaactctgtcacccaggctggagtgcagtggcatgatctcagctcactgcaacctccacctcctggcttcaagtgattctcccaccttgccctcctgagtagctgggattacaggtgcccaccaccacgcccggctaatttttgtattttttagtaaaggcagggtttccccatgttggccaggctggtctcaaactcctgacctcaaatgatctgcccgtcccagcctcccaaattgctgggattacaggcatgagccaccatgcccagcctattctatttcttcttattattacttcttcctttgtgtctcatgacctcctattcttttttatggatgttagtcctttcttcatttgttagaggtccttaaacatacttatatagtcacttttaagttggtccatttgagtaataggtgccagtgaaataataataataataataaatatttcatattaatttaaataggtaagttattttcatgagtgaattgatctcctaatatttatgttattggctaacttcttcagatttaattttcctcctgggttttagaattttgatgtatagtgagcaaaagaattttgtttagttttgtttttctctctggtatcattccctcctgtgctccatggatatctaaattaggctagttggattcttactccagaactctactgcctggtggaaacccagggtgcctgtcttttagtgatgtggatagtgtctattctgccactcctgccctttccctcttccctaggtgccgagctttgttttagctctatgcatatttttcagatacattttacaggtgattattagggctatatgtatttttcagataaatttttcatacctcctgctttgtgcttctaatttatgcagacatttatctcggggaatgaaggctgtgtctgttttattttttctcatttaaagcttgatatagcatttatttggagtagattagggccttaaaacaagaatttacaatgccctcttgcctggaagacatgtttcatttattttagcaatatctctgtgaaatatatgaagttaggctttatgtacccattttacaaatgcaaagagagggtaacaggtaatcagcgacaggcctggctaatttttaatttttttgtagagacgaggtcttgctatgttgcccagtttggtctcaaacttctgtcttcaagtgatcctcctgccttggcctcccaggtcacttggactcccaaaatgctaggattaggtgcccaacctaagtaggtaatatgcataattatattgaacatgtattcatagctcaggctttaacgttttttcttgcttatgacatttggaatcagggtgtgatggagaagctctatggtagataggccaaatgttctatttacaactttatcataaggtttttctactttagaatcagaggtttctgcttagagatttccaagccattgtttgagattcatgccactctttcactgtattcgttctttcaggtgctctacgcagaaaagtttatggagattttatttccttctccttgaccttcaataacacacaggtgatttctaatgaattcaaatccattccatggaggttctcctctccctttaatttcacatctttctcagatttcatcatctagagattggagcccttgtacatgggagaggtgagaatgggggtgtttgtgtttatacgtttcttgaattttatggccttcattacccaaagctgtgtgaaattgagggaaacacagttggcttgaactctagagccatctgttcaacctgttcgagatattggtggttgactgtttactaaacagacttccctgagtggcagcccaaaggcctaggcagaggcttctgttaatcattaggcgtttaacaaacagttggggccctcgctagctttgctatcattgctttcaggagcaacattcggtgccctgccatcagccatataacaggagatgggctccctagtgtgtttgctgtgaggatttcccgcaggcttgggttgccacgcccaagtagccgtggtcaagcattctgcaggagatgtgacgtgtgctttggttgttgactttatctttgccaacacatgtgagtgtctaatgttgactgggaagctgggctccagggtggagccaaggtttaattttgttgataatttaatgcttgaagagacatgtactttggtgagttctctcccttgagacttttgccctttcactaatcctttgcataaacactgccttgaaaactgtttatgaagtattcacaaaggcatgtgaaactattggtaaacagtcattgtgaataacatttactcatgatcagattcctgaacttatgtttctttttgagatggaatttattatgtgatgcaaatcttagtgaagcctcaaacacaggtttaagccctctgcctgattcttgtggcagattagagttcatgacagaaatggtaatttagtctggggaatggaaatgaaacttctcccaaagtctctgtattccaatagcaatctcaactagttgaaagtatttaaaaataggaaaagaaccacgaggttgcagaaacatagacagaggcaagggcaacccaaattttaggtaagaaaagaaaataaaaacttctaggtgaatatccctcagatctagcggtgtggtggagctgaatggcatggcccttaatagcagctcatatctcttcccagcattgttttgagagatagcaagttggtagcttgcaattgactacagtcagagcattcacaccacagaaatcggcaaatgctaccaatcgttgagagccagttgtagaatgaatgttaaccagtgcaccactgaaattaagagttaagactacctcttaaattcatttccaaggagcgggagacgtcagaaataaagacatagcagggttgaaggtatattctcagaaaagttgtaagagcttgactatatgatatacctgagtcaagaaagagcccctgaatttaaactgagcttttctttctgggtaaaactacattatttgtgaaataaagccactttagagaactgagagaataaaactatacaatgtaagcaatttccaggacttagcctttgtattctgcttggttttactggtttgattcattttatttatttatctgttcatttgacactttttgagtacctcctgtaggctgttagctcttcttggatgaacaaagacaaggttgttgtcttcatgaaacttatggtttagtaggaaatacagataataatcaaacatccagaaataagtgtatagttacagaatgtagtaagttgtataaaggaaaaggaggcctggagtggtggctcccccacctgtaatcccagcactttgggaggctaaggagggtggattgcctagctcaggagttcaagaccagcttgggcaacacggcaaaactccatctctacagaaaatacaaaaattagctaggcatgctggtgagcacctgtagtcctagctacttgggggattgagatgggaggataacttgagcccgggaggttgaggctacagtgagctgagattgcaccgctgtactccagcctgggtggcagagtgagactccatctctaaacaataaatgaattaaaaaatattttttacaaaggaaaaggataggctgctaaagaaatatcggatgacttggctatgctgagggtggatggggaggtttccatgaggaagtaaggactgagctgagatcagaaagattggtagcagtttcaccaggagaatggaagtaagtaatggaagaggtttaagcagagacagcaaatgtgcaatggccctgtagtgagaagaaatgtgtgtactttaaagaaaattaaaaaggggctgtagaacagagggcagggatagtggtgtgggatgaattgtgttaataaatttatgttaatctaggaagaatggaaagctgatagatcagatttgctttctgtttttaatttcactttggttacaatatggataactgattagaggggaagaggaagatgaggacacaagttagagtctattcctgtatattctaggtgagagataatgggactctgaccaggttaatggcagtggtgatgtggataaggagatacatggaagagacatttaggatataaaacattgaagacacctggtgatggattaaataagcgaatggcaggggagggggtcttatcaggatgactccaagatttttggctctagagatcgaatcgatcattgttctgtttactaagattgagaaccagcactggaatggaagccatgaatttggatttgggatgtttcaatatttacaatggaggtgtctagtagacattttggatatacagatctggaatagcatgaagagctgcctgcatctaggtggtaattgaggctgatgtcatgatgaggtctgccaaggggaaagtacagagagagaagaggagggggcccaagcagtaccctgagaatgttaaatagctaatgactcaatagaggagaatgagcctgcaaaggacagaaagagtggccagggaggtaggaggaaaaccaagggagatggggctgggagttaagtgcaaatgggcctgagggatcttattaaaaggatgaaactgttctaaaagtgatttatggtgatggttacaccacttggaaaagttactaaaaagcattgaattggacactcaaaatatatgcattgtatgatattgaggtaaaatgtacctcaaaaatactgttaaacaagaaacccaagagaatgtacaatgaccaaaaataaaaaatgagaacccttaatcccagcactttgggaggctgaggcaggtggatcacctgatgtcaggggtttgacaccagcctggccaacatggtgaaacccctctctactgaaaacacaaaaattagccgagcatggtggcacatgcctgtagtcccagctactcgggagaatcacttgaacacaggaggtggaggttgcagagtgccaagatcacacccctgcactccagcctgggtaacagagcaagaccctgtctcaaaaaaaaaaaaaaaaaaaaaaaaagagaatctttcaggaaggaaggaatggttatgccatgtgtgctgaatgttgataagtaagatgtgtaccaatggtcattaacaaactgaggactttaaacagatattaatgcaaaaacaacagtccaaatattgcataatgtaatactgtaaaaatactgacctatattttaaaacgatattttcaaagttatgagaagatgcacataccttggtcccacctgttctcaaataaacagccaaagtcaagatgtttgttatgtcctctgcatgaaacggcagctgggaaatggattctgaaaaggcaattctattataactggaagtcctgtttatatgcaggtaagaattagtcctcatatgtgatcaaaaagcatatttactctggaagtctgaggcactccaagactattgtaaaactcttgatttttctttaaatgatctaatgattacaaaggtattatgtcacaaacaataatcttcataaacattaacatataatcagtactttattcagcatgtggcacttagtaggtgctcaataaatatttgttgatgacacaaactcagaagttagaaaagtgagagtgctcattaattatttgaatctacaatgcaaattactacagtagcaaagctcagaagagcacaatattacatcaaaagaaaagaccaaatctatgtgagtaatttaaaagctttgtccttttagaaagagtccaccaattcttcattagtcttattcatttttcacttgatgacccaaatcagttcaagctagtcaaccaaatatctgcatgtaaataaataattcttatacttaatcatcttttgaaatgtatttttgctataaatgttgtcttatttcccttattcccatttctttggactatgagtctgaaaatgatatattttttttctttttgtacttcccatcctaagcaatagaggcctctgacgtctagattaggcctccaagaaaatatctacccaaggatttttttttaatcaatctgcttaatctaggtagctgtagaaggctggtgacatgtgacttgcaacccaatttttaaataaaacgtttcaactaaatttaaatgacttcttcaaattagattttaggaaatgcttaactcaggccatctgatgtttactgaatttcctgagctcatcctatacttacaatagcaacccagttgctattttccttttctctctctctcttttttttttttttttttttttttttgagacagggtctcactctgtcactcaggctggagtacagtggagtgatcacaactcactgtggcctcaacttcaagggctcaagcgattcttccagttcagcctcccaagaagctgagaccacaggtgtgcaccaccaagctcagctattattttgtagagatgggagtttcactatgttgcctaggttagctagtgttcttttcttttctatctatctttttttttttttttttttgacggagtcttgctctgttgccaggctggagtgcagtggtacgattttggctcactgcaacgtccgcctcctgggttcaagcaattctcctgcctcagcctcccaagtagctggaactacaggcatgtgccaccacacccaactaatttttgtatttttagtagagacaaggtttcaccatgttggccaggatggtcttgatcttttctgagagtaggaaatcagcacctatagcagaagtatggttgataagatgtcactgaaagaggaagatggtgagcacagagataacctaaaatgaccaattcttgatagaattagacaaggatcaacatgtatggcatgttgacagtgttctggtagaacgactactctaatatgtcttttctttttatacgtccatattttctacctggaaattaatttataatgttaggataattgttctggattagacaatattgcagatgtattttgggctatgcagcagccatacaaaattaggacatttgctcttaactctattgattaaggctctccattcactctgtaaacatattaactaatgctcaccacacactgagcatgtgagatgcttggtagctctctcatgggtctaccacttctgctcccacaagccaaagttgtatatttaccaagagttcattgtccctgtacttgtcattgtcatgtaatttgatgtatatataaatattttataataatatgctatatcagagagaaaagaatatttctttgaaaactaggatgaatgcttttgaaagactcaataaattatccccaaaatgctgtaggattaggtgtgaacaaggaaaatataaggactgagcatctttttgtttcaggttgctttataagggttttaaacttctcacttcacttaaaaagtcaaaactggaaatgatgtacaatgcaatatttgctatctcagaaattcaacatggaacactaattagaagaccatgctcaaagaaaagatctggatcataaattaaaagaccagtaaaaaatatccattaatatgttttaaagtcaaatgtttaaggcatatatagataattttctgtaattttttcactttaaccaatatttttgatgaaccaattaacttaggagtatttcaactgctcttgtgatttttcccaaggcaccctctcctatttcctcttctaaaataccctcccttacttcctagatatacttccccactgtacacactctctctctcctcactctcactcccttcctctcctttttttttttactgagccttattcattcttcaagtcctaagactctagctctgatgttcactcctctgaggagcctttcctgtcctaggtagagaagcagattgttctgtcctgtatgtcacttctgtgctgtggatataactttaggactccacttaaagcacagtttgtattgcattctaataatttacttaacacacttcattatcttttagtgtctttggggtcagtttccattgattgtccttcccttttgagcataggtcacacttttctgtttctttatatgttgagtaattctgttggaccatatcctggacattatgaatgttatgttggggtagctctggattatgttatattcctccaaagagtgtttatttgatttgatttagcaagcaatttatttatttgatttgatttagcaagcaatttatttagcgggattcaaagtatgatctctgtgttttgggggcagcaactcaaatctcagttcagttcattcatttgtaccttgtctgactgcaatctgcctgacacatgcattgttcaagggttagacagattcagccagagtttatacacagaatttgggttctctctctctctctctcttttttttttttttttgattctcttctttctataatctccctctcactcaccagtgaattttttataggactttacccactgtaccctcatgatacctaagtctagaagccataaaaatacaggggaaaaaaaagcccagtgtcttttccttcttccaaggtaaatttctctctagaatcttcctgctcttattcactctctgtcttagcctatccagctgctataacaaaatatcataaactgggtagcttataagcaacggaagtttattcctcacagttctagagtcccagaagtccaaaaagatcaaggcatcagcagtttcacatcaggtatgggcccacttcctggttcacagatggcaccttcttgctgccctcacatggtggaagagacaaggcagctttctgggacctcgtttacaaggactccagtcccattcaagggcagagcctccaaaggccccatcccctaataacatcacactggtgattagatttcaacaaatgaactggcggtgggggaaacacaaacatccagacaatagcactccagtttctccaaattgttggtgtcttttcattttgtatttaaattttatccagagttgatacaactctgagagaggactggtctgctaggggattacatatcctaccagaagcagaagcatttcagtatccttgaactactgtgtccaaataatgtctgacacattgtgtaggccctcaggaatcattgtgtgttgaacagaattaaatagaagaacattgctaaaatgaataaatacactaaaaggaaggaaaaagaaaggcttgttctcattagtttctactgatttttaaataataagtggttgacactttaggagcaaaaaaaatgatagtcaagaagacttgagaatagaaacagcacattcctatgatggctcaagttagcatgagatgggaagccacaaaaggtaggctcagagcagtggtgtctatgcaccaagaaatatccgggagaatttaaacttgtcctgagacataaattttcccaaggcctatcctggacacagattccaccaacgaagtaagttttcctagactttggcattattatgcctctgcttcatgagaaatcccctagaaaaatctgttaaaatcagtttagagaagaacagagtcacaattggctatgagaagataagcagagcatcacaacaaatagcaattatccatcagtgaggcgtctgcaggggtgagaggggctggggctcaatcttcgctcatttactatctttattaatgacctgggagtggtgaaaacagattgctaattaagtggagtcaggcctgcagtgagagccatagctggaaagagtggaataccaccaagctaatataacaaggttaggactctgggttgaaaactcaaaaggatgagattcagcagggaaggaatattgtaatattgttactgtgaagagaagaatattcaggcgggtgtggtggctcatgcctgtaatcctaacactttgggaggccaaggtgggaggattgcttcaacccaggagttcaagaccagcctgggcaacatagtgagacccccatctctacaaaaagtgaaaaacagacaaacaaaaggtcaggcatggtgttgcatgcttgtagtcccagctacttgggatgaagtcgagggctgaaatggaaggatggcttgagcctgggagttcaaagctgcagtcagccgtgattgcactactgcactccagcatgggtgagagagtgagaccctgtctcaaaaaaaaaaaaaaaagaaaaaagaaaaagaaaaagtatagctttctggtggcagagaatagagacttgaaaggagacacatacctggaaagaatctaaaaatgtgaggctgaaagaaggcaattgacaatggagtgtggcaggatattccataacaatcactcttccttgcagaccataaatgtcattaagatttgaaagagccaggtctcccccaagacccaggaaggagagcaggccctgctccctcttatgccttccatggttcccacacctcctcagtgctggggacttcctagtttgagactggctgggctttgcttggtgagctcctgcctggccctggtccacaggaaggtgtcaaaggcaggtgagcagtagggcaggaaatgtagtactacccattggaagagttaccttccacccacggtcatttatgtgcccaactcacttcaaagctcttaggtgtgtcataggtgatcttgtttacctattcatttattaataatctgtcttcccacaagaataatgtgctcccatgagaacaggggcctcatctgtcttgtttgccatagcaacatctatgtcaagggcaatgccgggctcattttaactagaaaatagatatttgctgaatgactgattgaagtaatgaatcttgtcctatgtgcccattttacagaagaggacacaaagcaacaccatgacttgcctctggtcacacaggtggaggttgaacctggactagaatccagttcttcacctctctcaggtctttaatcaaaagtcacctaattgaggacttccctggccaactataaaaaactccacactcctacaccagccaacatttcacatttcacattcccttctgtttttttttctttctgagcacttctcatgatggaaacacactatttgtaccttgttcatcatttgttccttcctgtagaatgtgggctgcaggagggcaggggtttttgtctgtgtgttcgctgctgtaccaccagcaacaacaacaccaatggccatggctaatgtttattgagcacttgctgtgtgccaggcacgtgacatggaatatctcatttaaaatccctagcagttccaggaagtagatgttgttattatgcccattttatagatgggaagacggaccttagagaagttaagtaacttgtacttatcaggaagtgacagaggtgggacaagaagccagatccgtctgacacccaggtcctgtctttgaccactaagccctgaactgcctcccagcaagagcctttgtggtgggagttggctgagatgtcagggccagcagagctaatagcctcctgtcctccttccccaggcagctgctcttttcctatgactcagctctactcacagaggagccaaatgaggctgcaaatcagagctggtgaccaaggccaccacaaagctcctgacatgccatttcggctggcatttcacctggtcacccaacatcatcagtctctgagtaggaagacaaagaggcagcctattcttaactcagactaattgtagagaggctccccccaccccctttctcagaagatccacctcctgacctacaccccatttgcaaaccctcctagagcagagtgggaagagcccagcatgtcagcgcttttcccctcgccatgattagcagattgtcttccaaccacagagtcaagtgtgcaccgtgctgattgatgtccaagctcagacagagtgaaggggagcagccaggtgttttctcgcaggtccgcaatctgctccccatttctcatcactcctaccctctcagcactcactgcaaggggcttcccaagttttccttggcttcttagatgcaggaaccctattgtggatcctcacaggacagatcaagagcaagggagacatatttattgggcacctactctgagggtgctatggaaatgatgtcacttagtcctttcccgttatacagatgggataactgagactcagccaagcttgtttaaagccacacagataagtggcagggtcaaaggtatgagaacaccagtttagttttaaagttcagtctctatttcccactctcttgagtttttgtggaaactgtgttcctttgtgtccctaaaggctgagggccatagtcccactcattcattcctcagcagaaaatattatctactatgtgtcagtcactgtgctaggtgcttggggtacagcaatgagtgcaacagacaaaacctcctgccctcacacagtccacattctacagagaggaacagatgatgaacaagataaaatatagagaggatattggtcacggtaaatgctcacaggttgagggaagtgtagagcaaatctgggaagggaatgtgaaatattgctcacagcagaggttatggaatttttcagagttggccaggggaggcctcactgaaaaggtgacttttgattaaagacttgagggaggtgaagaactggattatagtctgggttcatcctccatctgtgtgactagaggcacatcttggtattgctttgtgtcctcttctgtaaaatgagcacataggacaggattcatatcttcaatcactcattcagcaaatatttatttcctaattaaaatgagccaggcatggcccttgacaaagatgttgcaaaggtgaacaggacagatgaggcccctgtcctcatgggaacacatattcttgtggcaagacagaaaatgaataaatgaataggtaaacaagatcacctttgacagacctaagagttatgaagtcagttgtgtacataaatgaccgtgggtggaaggtaactcttccaatggactagtcagggatcctaatgttttgtgtttgtgatcctactacttacagccatgaggtctcctgcaagcaggttctctcttgtagggccttgtggtcttcaccacaagagaaaacactcagcaactaacaagtcccaaccaccccatgcagatgagacccagtcatgcgggcatctttccaaaggcgttgcagttgagagtaggaactggtgaactccgccaacggacagccagcaggtgcacaaggtattcagaactctaaaagagcacgactctcatgaaagcaagctgcagcttgcaggaggcattaggtttacactttccacccctcctaccattgcaaacaagttattagcagttttacattttcccttaggggaatcagtgttaattcaccttggcgctattctggcaccaagccattcatgcagctcacagctcctcagtgagaaaagaaaggaaggaaatgaggaaaggaagaagggaggatggaagaaaggaaggaacaaaagtgctaccgtgaagacttgctataaaacatcactcgtaccttctcagcactcatttcacccaaatgaccatcaatgaagagtgggttttttggaatcacatgtactcaatggcattcaatacgaaagcatttgggtgcattagtgcattagggaaggtgcctgagcttttttcaccataataacctctacttttcttccacttcctcgaggcttaatgaaaatcgaggttcaagagattcaaggcctttcacatcagaggtgggaaaactatgcttcagcctagaaaataatggcaggccatacaggttgtgttcctcttaacatcaagctccctcattttaatttggcaaatcaaattccttaaacatgacagtggtagctcacattggtcaaagcacaaatctgtgccctcacaatcatcatctcttttaacttgaataacgttgatccttgcagggactctctgttccaaccctgtctttgactaggtgggttggtttgcctagttttggaactgcatatcaagaagcctgcaaatgtaagcctcattctctgatatcagcattttcaataaataaaggtgaaattttggtttccaggctgcatcgctcttttgtcttatatctcacttggttcaaaacttggtaaggacagaggagtgctggctccccagactccaagaaaagcttattttgtgctacttcattctgcacctcctgcaggcttgtagtatctttttctccatcacagaaaacactgtgtgtacccttaacacctccctgagaataaaggctgggctagagttggcctcccttctaaaatggaaagtgaggcaaatcaatagtcagagataactatcaaatggaagtccagattactatatttaggaagaagcagttctcagaatctagcaagtccatagttccatccaacagagatggacatgggagcccattcgccatacagcagctgattgaatctaggagggtgcctggcccaagactagccaatctgtagatgtatatggggcctggcacaaagactttgcccaacaggggcaatgtcaatacaaaagatgtggacaataactactgtttattagacaatagcagctgatgtaccaggcattgtgctatgtgcttaacactcattatctaatttagcctcactgcatcagttaaatattattatcatttcattgataaagaaactaaaccgtacagagataaagaacacttggtcaagagacagagagacagaaagacacacacacacacacacacacagaattgggtgatggaggaagagaagggtagaattcaacagtagaatataacagagtggttagatatgtgctcaggaactaaaaagcctggatttgaacttcttacaactggcactgtacatccataaaatggctcaataatggtacctacatcaaatgattgcagtgaagtttagaggagtcaatacttataaaaagcgtagaacagtgtctagttactaatttataagttcaataaatattagtaattaacaccaatttttcccttacccgcaaataattctacgatatcatgtaatggcgaagttgtcaaatcaaaaacaatttctcctagaatcacgatgattattattttcaacctgtcacagaactgtgggggaggacaatgtttctttccatgcagtaggagccccacatgcatgcagctcctagctgccctctctgcctggttacctcattctccttatttgttcattccattaatatttgttgaacaccttatatgtgctgggacaattttcctagcactgggaatatagcagtggacaaatggaaaaaattcttgccctcgtggaacgtgtgtattcaaccaaatgatatattttcttgatgttttgagcttatgcagtattttgatgactttctgctatccttttcctgaacctggacctgggcactgctgccttgtcacaacttcacacccaccagggctacactgggaagaagagtgaggagtggcttcatttgattggtgaggctggaaggtggtgccagggactggggtccagctctcttctatgctctgaatgtttgtaccccacttccctccaaattcatatgttgaaatccttaccctcaaggtgatgaaactaggaagtgagtcttttttttttttttttttttttttttttttttttttttgagacggagtctcgctctgtcgcccaggccggactgcggactgcagtggcgcaatctcggctcactgcaagctccgcttcccgggttcacgccattctcctgcctcagcctcccgagtagctgggactacaggcgcccgccaccgcgcccggctaattttttgtatttttagtagagacggggtttcaccttgttagccaggatggtctcgatctcctgacctcatgatccacccgcctcggcctcccaaagtgctgggattacaggcgtgagccaccgcgcccggccggaagtgagtcttaaggaggtgactaggtcatgagggtagtgcctcacgaatgggattagtggccttataaaaggccagagagacgcttctctccccttccaccatgtaagttcacagtgaggaggtaccatctatgagccagaaagtgggcccttaatagacacagaatccgtcttgatcttggacttcccatcttccagaactgtgagaaataaatttatattgtttataagctacctagtttttggaatgttgtcatcgcaacctgaatgaactaagacactccttgtctctcctgcagatccacacattcttcagtgcttttccatgctgtgggtttcagggcagctgcatctgtggtcatccagtcctgtctatgactaagtgggctggtttgcctgattctggagtttagcttcaagaaacccagctgcctacatatataagccatattctccataatcattctcctttttcactttatcagtgaaaaaaaggtgatttagctttctgactgtcttattcttttgtctgatttgccatttggctcagaacttcatcatgaatgaggagtgccatttgtcaggctctcttaaatgccaaaagaaatgtattttgtacttccagattctgtacacacagcagacaatgtttaacacatggctaccatgtaactttatatccaacattagtcaagggttgactaattttcacaataaaacaaatgacaagagaacactaagcaatttaatttactgaaccaagtgtagaagttagagtccagaaatcaaaggcatgtttaacaacttgagtggatgttttctgtttcctgtttatactaaatgatgaacattactcaatagttaatggcagacattaaattataattatacattcattgtatcaaacatgtataaatccatatttgttttatatgtgaacacacagattacagtcattcttagttcaagttttgtaatactcaataaacctttggttagttccagagggcttcactaatgttttaattttctacaattcaatcaatgtcaattcactttaatttgaaaaggacagctgggcatggtggctcacacctgtaattccagcactttgggaggccaaggcaggtggattgcttgagcccaggagtttgagaccagcctggacgacatggagaaactccatctctataaaaaatacaaaaaactagcagagcatggtgatgtgcacctgtagtcccagctacttgagaggctgaggcagaagaattacctgagccaaggaggttgagactacagtgagccataatcatgtcactgctctctagcctcagtgacagagtgagaccctgcctcaaaaaaaaaaaaaaaaaaaaaaggaaaaggacaagatactctacactgcacgttggtggtatgatggtgaggtggactataaaaatggaggttatgtctaaaaatcaaagggaaacattttctactctgtaattggaaggtttgaatacttcatcagatcttcgagattcctttccatccacattttcataaatccttaggcttcatatttgtctctgggcaaaccatgcagggtaagttcatcttacaaaccagtctaggattacaccatcctaggtagcaaaactgaactaaccagattcacttataaactcttaagccctttaaagtcacagaaatatgattgtatttgtgcttacccaacaaaagtttttttaaaatactggtttaagagcatacaatatactcctttatctaattcagagaattaactacagtcattttggttataatgtgacttacagttttccagacttcagttcatgtcctacaagttttcccatcgacttcacctgtgttcccctctcctcatgactttttcctgtttttaatccaggttcacctttctttacagctctaactgccttcagcatctctttgttcaacttgaagtacccagtcagatctgctatttcaactctgaagccctctgggcagctctctctgatcaaactttttctagaaaacaataatttccttcaagctaatggaggtaataatactgagaaagatgtgttcattttactcaacagaccttgttggactctcagatacaaaatggaaactatgctagggactgattatgtaaggataatcctggcagtcctgaaaaagaaataagatattagaaattagataaggattagtagtatctgcaaagcttgctataatttctacctccaaggctcatggcagacaatgataatcaatcacagcactcttcttctgttgaacacagattcaacatcacagtccatttcaaccccagtgctctgagcagctactctcaatggattggatccaacatgtgcgatgaaatgtatttgccgtgcccaaaatcagacctgggatagaggtgggaatggggtgaggagcaatgatgaattattctaggcagacttgagtttgctaaatttggttcaagtgagattcttgattaatagaacttgaagtgcaagcatgatcataaccaactttcatcataccaggcaccatgctaaatggtttcatgcagtatctcatataatcctcataacaatcctgttcagtcagtactgccattattccaagtttgaagaagaaacctatgcacagcaaggttatagatcttacacaaactagtgatgaagtataaattcaaggtcaagctcactcaagagcaacacaagttttcaaaatggagtgtgagccattaggacatttcaagcttctctatgtatttatttttcatccaaaaccaagactaaaaatatactatgtgaattattactggcaccctaagtctgaatatcaaatgatcacttgtcacacacagcatgggagacaccctgtaggcagagtacagtcctccaagtcagagggttgacaatggggccttcatcttccatgctcttcatatatcaagaggtgctactattcacacatagtctaaagacagcagaatcatcaataccttctactgagacggggagtgagcatgaaaatattctgatcaacccagaatttcacaggttgtcttatggaaaagttctgaatagatttgtcaaacttaaaaatgaattccacatttttcttttataagaaagatgttttgtattttcagacttttactatgataacaaatgctaccaagcagatatttttgaaaaaataagcacacttcatctgtcccttcaaggtaaaggtgacattttaacaagtaagaaagtctttctaaagaaacttgtatattaaaagagcattttggaaatggtttgagttattcatctgttggtacaaacagtataaatgtgacaagtgtcagcactctttaaaaagttgaaaatgtaattttctaagctgtttaaagattttctaaacaaagaatttcaatggcttttgaacccatttgttaaaaataataacagtagaacagtgcaagtttactttgtaagaacaactgatagacatcaaggaagataaagataaaaatttccaagccaaattcaatgaatttgcataatttgcaaataagattggaaaataaactaaatgatttattaattccagccagtgatgcattttatcatttgtctttgtgtcccttggcaaaggaaattttttatttctgacagtcctgaaaaccaagatttaagttattctgcctaagtttagaaccagctcctcaaattgtttttatcataatgggtttaacaaagatttactgaaccattgctcttgctaaaacatgttaattctttttgatgaaagcaaaatatctttacactgttagaaaataaaattaaaaatcagtttaagaatattattttatctttcacctcatttttcaaattttcttttttgttgttgcttttactttacagaatacattggcacagtagtccatgtatgtaatttgtaaacagatatgcacatattggggtatgctcaacatttgtttcattaaagatatacagccaaagaaattttggagcctgctgcaatgctcccagcagtttctagacctgcagtcagtgaaaaggaaatcaaggcactgaagagcatcagtcaacccacaggctttatatcttcacatatattaaggttaattatattttataaaaggaatctaattgtatttagccaccagataagaagccaaaaccttaggttcatcccctgctgccagaggccctgaagtttggcccagaacaatcccatagatagactgtgcccctctacctgtcatcatgtcagagggggccaggcttgagaagaaaaatgagtggggggaggtctgtttcctaaggtctctcaaaatagctctctgaactggttggggtaaccctaatcctccactgtgccagcagcgcagctcagtgtggtccccagcgacactgtccctctgtcacctaggctgagaggctgccctgtccttcacttctgttagcacagataatccaaaagtgtcaacagaggaatcatgaataattaatgtgacccccccaaagcttaatacacgaagagaaagtttatctgcaagctcaaggattgcctggggctctttagacatgaacagctacagtaataccctctggagtcttctcctctctcccccctctttcccttctttctctgtgggctttggacatctcacccacaccccgaaatgggcagccccctccatccttgaggcgtgtgtgggtctgatgacagaaaaggttcatctctgaaggcagttggtgaaactgactttctacccagaggactttctttaactcatctccctgtcttctaggtaggttgggacagtctttgagcatctctatacagttaatgaacagagcgcctaagcattcttgaaggcctgtataagcctccagtctgtgaaccctcctctgttatgtgaatcgttatctctctggtgacaggactctttctcagctctcccacccctctctaccctcaccttcctcacccgtcggatttttttccttcccacttctttctctaatctcagaagcaccttaggctaaaatgaaatcattcttggtgatggtctgaaggtgatttaaaagtataacatgctattccttattttcttttcaaaacaaagtgagttcttagagaagaagcaaaccaaatctgagctaatagaaaccagaaaagcggttatctctgtgggtattgtctgcgatgagcaggagagaaagctctagggtggtggaaatgttccacaacttgatctgggtagtgatacacgtgtgtacacatatgtaaagattcatggagctgtacactttatagtgtgaaaattatatgtcaaattttaaaaggaaagtaaaaatacaataagctatataagctatgttcttcagggtttcagaagctggtatgatgctcagactaggaaggctctaagggcgcgtggaactgtcagcagctgggcagacacactctatctgctgcttggtacagtgcctaaccagggttgctgagctccatggaaatccctgggtggattgcgccaggctctcctgaaggagccaagaattgtgtcattgttgttgttttttcccttgggacaaggcctagccctgacacctagactggagtgcagtggcatgatcatggctcactgtagcctcaacctcttgggctcaagcaatccttgcacctccgcctccagagtagttgggactacaggtgtgtgctaccatggctggctactctttatgttttattttttgtaaagatgtggtcttcctgtgttgtccaggctagtctcaatctcctgagctcaagcaaccagcctgcctctgcctccccaagtgctgggattacaggcgtgagccaccatgcctggctgagcctagagttttaaaaattcatcttgaacgctattatgtgccagctacaatgctgggtgctttatgtgcatcaactcatttaattccccagataatcctgggatggtgaactgttatcctcatggggcagtcagggaaccggagccgccgaggctgggcaggtggtccaggggcatgcaactcatcatgtggcaagccccgtactcccttcacactccctctgtatcaccctctcaattagaatttccttgtggacaattctcttttctttgctagtatgatgtgtcattcttttttttttttttttttgagatggagtctcgctctgtcgcccaggctggagtgcagtggcgcgatcatggctcactgcaagctccgcctcataggttcaagtgattttcatgccttagcctcccaagtagctctgattacaggtgtgcaccatcttgaccagctaaattttcatatttttagggtttcaggatttaggccatgaaatcctggcctcaagtggtctgccctcctcggcctcccaaagtactgagattacaggtgtgagccactgtgcttggccaggatgtgacattctttaccccatgttgtgacgacagaaaagtaacagatggattgaccaagaagaggacttccctaaaaaatattgctctggagacttagccttccttctcctcaccaagaaggaaaaataaaagtcatctctaatctagttcccaagagaggagtctttctagctgtgcctctgtggcttccctttagttctgatggcagtggctggcagccagcctctgaggattactcagcatgtctgacctctccagaggggatgctttaactttgtaaaggtatgagtgaatgaggagaatctatagtttcttcccagagtaatccaccttggctactttaggtagctactctttaagtcgccagtcctctgttgttttggggtcatgcacaagcttcagcaatgtccatcacgttcttccaaggagtagaatatgatgcttcaattgtcaggggcccatgtgtattggtatttaccatataccatgtgccatatgcttttggcatcttagagcctgttctgtaccctgttctgcctcttggtagtctcaagagcttaagtaaattatttaacatctccaagcctcattttcctcgtttttaaaatgaagatgattgcgacaacaaacaataataaaacaacaatagtcttaattaggctcattttatgtaccaggcactgtgctaagtaagcacttttcatatgtggactcagtttaattctcacaacaaccccatgaaggcagaactgttgctatcccctgctgacacatgaataaactgagacacagccaggactaagttacagtcaggattttaattaggtgtacctaatccagagcctaaactctttaactttcatgcttctattctcacctcaacatgttgctgtgaagtgcttatatttgtgacagcactttgtaaacaataaagcaaaagcaaaatattaataccattattattagttttctaacttcatgaaaaaagagttaaaaataagagacacagcccatgcctttgagaaatttataattcagaagattagatgggcaaaaccccacaaaaacatgaactaaaaatgcccaactgtgtaaggcgcacagctagctgaaactgtagagagaaatgcacccaggggatgctggaatctctagaatgagtggagccagagggtgttggtgtgagaagaccttgcaggagtatcctgctgttcaactgggaaacagtgagagaggtgtttcaggaggcggaatggcctgttaggttttgtgggagctgagcgcacaggttgcctgggctaagggaaagtgtaagtccagagaggtgcttagtaaaagacaacagaggagtgagagcggccctggccaggggaccaggaggccacgttatccaaggccctaattggatttgcaacactacagtgagccactgtgggtgtctgacaagagatgcgatgtgacagaaagacacaccaaaaggctggtaaagacaacagcccaaggcaagcagtttgttgcaaatagttcagggatgagatggacatgcttctgcagagaaggaatgtgtcatggcttgggaaactattaaaaagaagaatccagccaggcgcggtggctcacgcctgtaatcccagcactctgggaggccaaggcgggtggatcacctgaggtcgagagctcgagaccacctgaccaacatggagaaaccccgtctctactaaaaatacaaaattagccaggcgtagtggtgcctgcctgtaatcccaggtactcatgagactgaggcaggagaatcgtttgaacctgggaggcagaggttgtggtgagccaagattgtgccattgccctcaagcctgggcaacaacagcaaaactctgtctcaaaaaaaaaaaaaaaaaaaaagaagaagaagaagaagaagaatcccctctccggaaccagtccttttgaaggccagggcagtatccaagtgctgtggggctcacccagcactcccagtgcctggcgcttcctaggcataccataaatatttattgcataactggacttattgagaaacataatggatgtaaaatgtaaaagaaaaaaagtcagggattagaatcaaaggacactgacggctactgagggaccaggacaccagaggcaccattgatgattatatgaaattgaagaagacttgacattcaggaaagaaattcattatcttgggtaaagttggaggtggcggatgtaagcggtgattcctgactagaaacaagaaatgaggttcaagaaatatgagaagtcagatgaatgatgtagatttggaagtccatggacaaatgagtatcagttaggattcttatttgcaagcaatagaaactcccaccagctgatttagatagaaataaatttactgcaaggacagtttctaattcacaggggaatttggagtcactggggaatctggagcaccaggcaaagaagttttgcaggcagaaccccagccaagtgaactccccagaacaagccagcaaagacagctgtgccaccatggctgagtcccaggtgacatcacttggcttgccaatccagtggatgtgggatgttaggccctccactagtacctctggcactgccatggggacaagttgttactaccacttctctacccacaagaagactcccactctgttcttgactgttgtgtcagagtcccagccttggggtctgatggacagaatctaggtcattaccagacccgaacagcaagagaagccaacaggaaggggctttgcttctcacaagacgagtacagtggggaaggtggttcagacactgccgccaaaaccacacgtatttctttcaggaaggaaagaggtgaattcagagcaggaagcgccaggggttcatccactagggctggcttcactcactgagagaacagggctgtgctgatagggtagacccattcttcaatacctacaaactatctgccatgaatcccaacttaatgcctttaatcaacagccatctgtttatggtaaaagtctgttccagtttgaaatgtaaaatccttggaaagaaccacactttactttgtcatgaacctttcatgggtcatttgtttgtttgtttgtttgtttgtttgtttgtttttgatggagtctcactctgtcgccccagatggagtacagtgacatgatctcagctcactgcaacctctgtctcctgggttcaagccattctcctgcctcagcctcccaagcagctgggattgcaggcatgtaccactatggctgactaatttttttgtatttttagtagagatggagttttgccatgttggccaggctggtctcgaactcctagcctcaagtgatctgcctgtctttggcctcccaaagtgctaggattataggcatgagacactgtgcccgtcctgtcatgaacctttcatgcactaactttcagggtggtggggagtataagctggtacacacttctaggcccagcattggaaggggcctgaaacaaatgtcaatccttcgtaaagatttttagctaagcatctacttttgcttagggacccccaactccagtttttccctctcatggattctcagtggcccgatcaatttgtcacaacactgtccaacatggtaactattttaatcagggagaaatgacagaagaaaaaggagactcatgttttgtgttgctccttctacatgtgacactgtgagaacagggcccctattcccatttgatggatgctgaaactgaagcttggggtgatgtgacttgcccaaggccacagctggtgtgctgcagagatagggtcaaagctggctccattgtctccaaagcctgacagcttcccctgagctgtgtcatcttttcatgaaaaaagaggaaaatttgtttgcaccttcccagtcaaaaggttaaaggaaggcaagaggttggtggactgtcccgggcttgccttgacatggttgtgcagggtttccttgggagagggtatgcagtactgaggaagagagaaagacacagaaaccagctcctgttttataacttcacctagcacctgtatttgtcaagaaatctttccagctgcaaatactagaaacccaactcaaactggtcgcataggaaatggggtctattggtttgtgggcctgaaaagcatgccaggagttctccccatctctctctttctctatctctcagctcggctttcctctatgtctgcttcattctcaggcagcctctccccacgtggtgacacaagtgaccagcaacagtctagacttaatgtctcaccagcctaggaccccctcccccagctgacacagtggaacttttccccaacagttgtagcaattaaccaatcttgtgagcaaggggttgcagcaccttgattgtacaggccttgagttcatccctgcccccaccaccaagaattccatcagcctcccttgcatcacagggtttgagcatggctcccccaaaaaacagtgaagtgctggcaccataggaagggatgctggaggggcaaaagccacagatatccactggaatgtacgccacaaagacaggtaaggtttttgtttgtttgtttcgttttaaaaaaaaatttgttttaaatttatttaccactgtgtccctagggctcagaacagggctgaacacctgacaggcacattcaagaaacatttcttgaatgaatgatggatggactgcaaaaaaaaaaatgtccctccagaatatgatgtccaggatagcacgaatgggagattgggtacactgcaggtacagactagagtagggagcagaagctctggtcctgtagatgagttgtgtgtcattgaatgaatgacacatgacttctaaaatgttggcattcaccacatgtcaatcacagcatgaaacagagctctggaatgccagtctccagcaagggcagggcttttacagtgcagttgcatacaagtcccctgggaataaagggtgatgggtcacttttttcttacaggcttgtgtctacaagatagatatgcttcatgtgctgctgcttttcctccccagattcccactgtgaaatggaaagccagcatggtggcacccattcacttggaatgaatgtagggtcctggtctgacaggagcctgagtggtagcattccagaatgtctactcaattgctgttaatcgggtctcatgttatctctcatcagcatgctaacccagtgccccagagtgtattctggggagaacatgtacttcaaccccctgcccaaattacctcctactctcattaccaccctttggcttttccgtggcacataggaatagctggcctttctgaattagtaagtagaatatgcccagtcaatgtgtctcagccaaacgtggatttcttgacaaaagactgcgaggatgttagatctggaaatacttttacagacaaaaacaaaaacaacccctgaaaagtcactgcaataaactgcctggttagtatgcgcccagtgtattttgccattgtggaaactgaacttaatttgttttaacatgatgcagctatttagcatttcctccccctcctcctccttctagttaattctgagtggagataaatcttgaaaacagacttggagggcacagcaggaggccctgcaaagtcatttgggttgtggctttcacggtgcctctttgctattttctgagcaattaaaacttaagcaggaaaataaagtgttattaaagtgactcatgaacattatagaggctgggtgcatggaatacttagcttctgacaaagggttccttaggcaccaatgggtgttcaaaaaaattcctatcgccccagtaacttctctgaacactagaaacgtaggtagagaggactacacccagtgggttgtcagccctttaactctaacatcattccagagaggtaggcaagctactgaactgtcagttcttaaagtagggaacaaaggctccaggagttgaacaattttccccaggcaatttgtctgagccagtgacagaagctcaggttctctgtctgcagaaacaaagtgacagggctgcaccgcattaacctctaggtccctcccttagtattgaggttttgatccttggtattttcttccttgatccaggcagccataactactgttcgttttggtctgctatgattatttgactctccttttcacctccacatgccttcagacacgccatatttcattgaatctaagataacatagataagacgatgaaccactatcttatatactgccaaaaaggaagaaatgttgccaattaaactgtgacatgacattgatcatgatttaagagatgttaaaatgtggaggaaaaaaggagtcatagggtccaccaaatatagtactttgttatttgtctgcatggattcagaactctttctcttctttaagaaacaaatttagaggagtattcatttctcccctctgatcttgtggtcccactgaaagtcacccatcactgtactctgctcctctgcccacggaatgagcatgaaacccaaaatggacaggtagactgccctgggattttaaacactggaggaagagaagtgagggctttgtctccagtgccaaagaagatgtggggccctggaactttgagcaaccagcgctccagtcttgtggagaaatcaggtttgagaaaaagagccgcttataggaaaaacagctgagacagagacagagagggcatctgcagggttaaactttttgaatacttattgtccttgatgggcacagcagcaccagtaaattctcccatgctaaacctaggtttcatcctttgaagtaagaatcttctccctttttttcttgagacagagtcttgctgtgttgcccaggctggagtgcaatggcatgatgttggctcactgcaacctctgcctcccaggttcaaacgattctcccacctcagcctccagagtagctgggattacagatgcacaccaccacaccaggctaatttttgtatttttagttgagacagggtttcaccatgttggccaggctagtcttgaactcctgacctcaagtgatccacctgcctcggcctccaaagtgctgggattacaggcatgagccacaacacccaaacagaatcttctttttcacagacgctgatagagtaactaagccaacaggatccctccttctctcttccgggcatgctcatgggaacccactgtgatgttcaggcaatggacaggaacaacaaacctgcttctactttgacagtttagccaccgtctgccatgaccaaggacttgtgaacataggttcatgcctggtgttttaccaaggaaatagagttgtattttttcacagtgaatttcaatattttaaagaaagagaaaaacaaaatacgtctagtgggggtgggggcaaagaggtaaaagaaaagggaatacatacatcaagaaaagacaaaaaaagaactaaaaaagaacaacgatctgattttctctcctaaagtcccttctattgacaatgcattcctgacccttttttcaaaatcttgttggtggaaagagtaggcaggggttgaaaatgaaggatgaaccttttaaaaattgcagaaataaaaatgtggtcaaataatgctgaatagaaccttaagttgcctcagactgtgatgcttttaaatttctgaggtttgctgatgaatacttttctaaaacttttctatataaaactttaaagaccatcaggaaattatactaatccacttaccctattttaactcttcaaatgttcctacagcctctgattttctgttgcagagagaggttagtggaaaattgcttttgaggtttcttttgtacaataataatcttgggcagtgcccaccttgctgtgtcctcacgtgcgccttgtaaattgattccaagctgctcccttattcaaaaacccaatccccttggaaaccagaaagaaaatgaatagtggtaggagcctattttactagtatcaagatcaaaaccttcattacacaaatttgtttgtccttcggtcccttttaagtaagaaatatacattatgtactggtgctaatctcacatttctgtaatactttttaatctagatggaccccaaagttgtagagttgtctaacccttaatgacacacacacacacatacacacaaaatcattttctccttctgcacctgagtattttatttattactctagttactttgtgtgtgtgtgtgcatgtgcagtaacacttctttatggtgttttctgaaggtttattaactttttatatacagaaatgttgaatggaggtgatattattaccttatgggtctttgatcagagcttttctgccagaggatgccttttgtgggaaaacactgaatgaaagaaaacaggcttaccatggagcaatcacttaagtattacacttacattgagcccactggggaatgctgtgcagcctcttttctttctacaggagaaaaagaaaagaagtttgaaacagtatcactacctatcgtagtatcaccagtttttgaagttatctgaaagataactgttattaacctgattcattagtgaaaatactcctttcatcagaatatgaatgggaaatactccagtgacggtggtgtgggtctgagattcctgctgtatatttctttctctctgtatctttacatctggactcactgaagccctccatgggccaccctaacctctccttgtttctgagcgaattcccatagagtcattcacccttattcccttattgttgtatcttatggcagtaaggctgcccaaaggctagtgtaccccaaaatatatcatgagtatcagagcaccccaggcctccctttgtggtataggccacaggcccagcttgcctccatctccctgtctggtactctaagttcctgttcagactttaacctctatccacctgactgtggcttttggcagtccctttttccaacggggatctcatgaacatctgctcttcttgtctgcccagcatgtttccctccttcctctaatgtcagacattaacttaaattttggcaaactatccactatcatgttcatagttcatggggcttgggtcagtgtgacatcatctcagtcttagctctagaagttaacacatggcccaaacctagccaatcagtgtatatatttaatcctgtggccacagtgattggttcagagataagcaagtgacacaagttggtccagcgagaatcagttctgagatttgagttaaaagtattgaataggagaagctctttccacaataccatttctcagtgatgacactattgacacttaagtccagataactttgttgtggggggctgtcccgtgcattgtaggttgttgagcagcattcctggactatatctgattagtaactactccccctcccagttgtgacaaccaaaaggatctcctgacactgccaaaagtcctcaggagtggattgatgtgggaaaggacagtcactcttggtcgaaactactggaatagactgacaactatgtgatgtgtgcctggaactgctaggggatctcatgtgaaaaaatcttgcctgatagtgatgccaacacatagaaaggtagggccaagagaagacacgaagacccaataacattcttgaagctcctacatattttgttctcctatgcattaagccagtaccaactaagcgagggtgttcactctcaccacttctattcaatatggtgttatgtaggtcttatccagatccagttccaaatacaaaaactgcaagtaaaaggcataaagatatggaaagaagaaaaataaaattgactttatttacagaaaatataatcttctatgtagaaaattctaagggatctacaaaaaaaacctaataaaactaataagtaagcttagcaagtttggagaataaaaatcaatatgtatctttcaattatactttgatatattagcaatgaacaattataaatttcaattttaaaacagtatcatttaaaacagcatcaaaaatataaaattctttgggataaatttgacaaattatttaaaacctatattctgaaaatcataagaccttaatgagaggagagatagaccagattcatggttagaaggttcaagattgttaagatatcaaacctctcaaggttggtctatagattcaatacaatcctaatgaaaggccaaacagaattttttttttttttttgagatggagtctcactctgttgcccagcccatctggagtgcagtggcatgatcctggctcactgcaacctccgcctcccaggttcaagcgattctcctgctttagactcctgagtagctgggactacatgcgccctgccaccatgcccagctaatttttgtattttcagtagagacggggtttcatcatgttgaccaggctgatctcaaactcctgacctcaggtgatccactcaccttggcctcccaaagtgctgggattacaggcgtgagccagtgcacctggccaggattttttttaatagaaattgatgagccaattctgacatttatttagaaatataaaaggtctatagtataatagtcaaagcaattttacaaaaaaaggacaaagttggaagacttataccacctgattcaagatctattataaagctacagtaatgaagacagtgtggtattagcataaagatagatacatagatcagaggtacagaataaagaagccagaaatgtacccaaagtgatatcacaaattggtttttgacaaaggtgtcgaggcaatttgagaggaaagaataatcttttcaacaaatggtgctagagcaattggatgtccatatgcctcaaaaatgaatcttatttgtctaacgttgtatacaaaacttaattcagaatagatcatatattaatatgcaaaatataacactaaaattctagaaaaaaacagaagacaagcttaatgatctgagattaggcaaaagtttcaaaataggactaaaaaagcaagaagtataaaggaaaaaatgctaaattaaacctcattaaattgaagatatttactcttcaaaagacaccattaagaaaatgaaaagagaagctacaagtggggagaaaatatttgcaaaaacatatctgccaaaggacttatattcagaatatataaagaactctttcaactcaacaaacggaagagaagcaaccaaattattaaaaaattggcaaaagatttcaatagacacttcatcagggaagatatacagatgtcagacaaacacatgaaaaaagtattagaaatcattaagtcattaaggaaatgtgatgcaaagccacaatgactgtactcaccagaatagactaaaattaaaaagattgacaatatcaagtgtggacaagggtatagagcaactttaacttctatacattgttgctaggagttcaaaatagtacagcaaacttgaaaaagaggccagcaaattcttgaaaactgaaacatactatatgattcagcaattccattcctagatagctgcccaggagaaatgaaaacatacatccacacaagacttacatgcaaatggttttcatttcagtattattaataagatccccaaactgaaagtattccaaatgtttgtcagcacatgaatggataaacaaattgtggtacatccatacaatggaatagtattcagcaataaaaaggaatggaattcatgatacataatcaaatattacattatgctaagttaaagaaatgagacacaaagactatatactgcatgtggttctagtctatataattctatcatagtctatattctgtctattatatctagaaaaggcaagattctagtaatatgaagcagatggtggttgccaaggaccaggagttgggaaggagattgattgtaaagagccacagtgcaactcttggaggaatgaaaatgttctatgcttttactttggtggtggtaagaggactgtcatatttgttaaagctaactgaattgtacatcttaaatagatgtgtttcattgtatataaactctattttaataaagctgcttccaaaaggcaaggatagtagcacgtgtagggtatctacacctgtatcttacgaacattagaaggatgccatgaaccaggcgtcagcagatagtaaatattctaggtttttgggccattcagtctccgacacagcttctcaagtatgcctttgttgcgctcatgcagctatagaccagtaaatgaatgggagtggctgtgttccaacaaaactttaagaacactgaaatttaaattttatataattttcacatgtcatgaaatattcattttcttctatattttcccctctaaccatttaaaaatgtaaaaaccattcttagctagcaggccatacaaaaacagatggcgaaccagatttggcccacaggctgtagcttgacaacctctggtataaacatatgttagtaaaaatacaacaattatcgtggctatgtcgaagaggtgatgatgcaggtgaaatctctaatagagtcatatctacatgttagacatctgtgtctacaataatcagcacaatacattttatttttacttattctttaatagtgcatattttcttgccatattaatattacttttggagtaatgggctttaaaaatcaagacttattaaatgaagttcaactttaaaacaggacatccatataaattcactttccctggtaaaaagacatttttgatatatttgatttttaaaagctttcatatttactgcatccacgccacacattaccctgatttttttttcctttaccttctgtccaattcataggttatgtggggggctttgcacttgctgtattctctgaaattttcctattctacatatcaacatttccctgaagaaactttccattttcagtctctgctgaaaaacttatattaatgaagccttctctggcctgtccatactctacccactccccacctctcacgatgaatagtaaaccatgctcctagtcctttcactctactttcctttttttccccatagcgcttataaccttctgttacatcgtatctttacttgtatgcttgttttctgtctcctcttattagaataagctccatgagggtgaagattttgctttttccaacactgcataattccagttcccagaagagtgcctagcaagtagtaggtactcaatatgtgacttgctgtatgagtaatctgggaatgaacagagtacgattttcacaggagcatcatccaacgactgccatatactgagcaaaaattatgctgagaatcattggcctgaggcatccagaatggtggaaaaaacaccacttcacaccagccagtaggaagacaaacagatcacactaagggggtgtggtgctgtggacccgtgaggagccctcatggaaagggctttcttttgggaatacatcttacaaggttttgaaaaactgccatgttggagaactttcagtgaccatgtcttctgctgaaaacagaatggccctttactttcccttagctaaacttaactaaacttctttctaacgttttctcatcagaatgcttataaaggagggcagattatttacaaggagggtgtttcccaggtttcacaggggagtttggagcaaagcatagtgtgttagattcccagaaggcaattcaagccttctgagttacggatatccattgcacaaaggttattttatatatatatatctttataaagcacatttcactgtctccaaactgcagtgtcaaattgtagaaatctgtgcctttgaagttcttgacatataatgttgacattttcagactctcagttctgtgatgaaagattagaatgatggtggtgaacaagaatgacctatagaaagacattttctgaagtggtgaaaacatttttttaatggatggagacattttcttttaaattacatgttgatcatgaaggaaaaaaaaagagaaaagagagaaaaggaacatacaaattggttttaattttctgtacaaaatcttataggaactaacaaatacaaactttgagcagatttgtgtttgaaacatctttgtttttcgccatagttgaaaacattttcatggggaaaatatggtccatattttcctagaacataagaattgtgtcaaaatgaatctgatgttgatgtgtaaaaattagcaactaagtttgaattcagacacttttgtctaaatatttgttctgactcttggccttgaaggagaacattaatgagtgttctccctctctcttgtatgtatgatatttacttgattttaagaaacactcttttctcattttaacacatctaaaatcagaatgccttataatggatggcatctcctaactacacttgtcagtgttttttctctctttgtgatttataaaataatattgattcttacagttgataccatcttagattccatgaaataaggtatacataaaacagttttattatttttatttttattctcttcctcatcagggaccactccctgcctcttttccccaatttccttatgaagcttaagagcaaacccagtacaaaagacagacgtcatactattgactcgcgggctccatattaagcttcagtacttcaaatgataagttttcttatagtttcagaacttatacctttataagtcacatgaacaaagttattatttgcaagcacctgtttagcacaagttgctatgaatgtctcagatttgatgtattttcttccctttcttgtttttttttctttctctagacggatttctcacctattgattgctcagatagtaaatctgaatttaatctaggatatgacttaggaaattataatattcatgttgtgttctctatatgtccagcaactcaccatcctaacaagggtttcaggactaactaaatgtcagaggtggttagacaatgtctggaggactttgctccaggatcaggccacaaaagtgcaggtcagactcacagagaaagaataggctatggggccagagggacctgagtttgaatcctgtcatgaggtgtgaatttatgtgcaagattagaacaacaatacctaccttgcaaagttatcctaaagactggatgtgtatgaagtgtttgacaataggagggcttaagaaatggtggctaatagtattattcaagatcatgtataagaaaaggtgagcccaggagaaatttggcaagccattgcgccctttagccttcttttgtatccttgtttgttcattgttagagtcacagcgttctaatatttacacctttgccctgccacaaattatacacgcttagaattgctctcagttggatatctgttatcacctactgacatttcaacacaaattaacagtgtgccagagaggcctgggttggaattccggctctgccactcaccggctaacttaccctggacatgtgcttcccctttgtattcgttagagttctccagagaagaagaatcactaggatgtgtggagatagacatagataagatacagacacaggcacagatatagatactgatacagatacaggtatggatacaggttcagatacaggtatagatacaaatataggtacgggtaggccgggcatggtggcttacacctgtaatcccagcactttggaaggccgaggcgggtggatcacgaggtcaggagattgagaccatcctggctaacatggtgaaaccccgactctactaacaatacaaaaaaattagttgggcgtggtggcgggcgcctgtagtcccagctatgcaggaggctgaggcaggagaatggcgtgaacctgggaggcggagcttgcagtgagctgagatcatgccactgcactcgagcctgggcgacagagtgagattccatatcaaaaaaaaaaaaaaaaaaaaaaaatatatatatatatatatatatatatatatatatatatataggtacaggtataaatacaggtacagacagacacagatataaatatcgattatatagatataaatatagatcatcagaagaaactggctcatgaaattatgaatgctcacaagtcctaaaatccgcatggtgaggtgaaaagtaggagacccaggagagctgatgatttagttccagtccaagtctgaaggcctgagaactaggataaccaatgtttagtactctagtctagaggcttggagatttgagaccaagaagagccaatatttcagtctgagtttgaaggaagggaaaagctgatattcaaaggcagtcaggcaggaagaattttctcttaccaaagggaggatcagcctttttgttccattcagaccttcaaaaggttagatgaagccctgccacattagggaaggcaatcctgctttacgacctaccgagttgttaatctcatccaaaaacaccctcacagaaatatcaagaataatgtttgaccaagtacctaggcacgctgtggcccagccaagttgacacataaaagtaaccatcacaatctgagtctcactgtcctttttgtaaaagggggataataagcatatttcatcaagggattgctgtcaggagcaaatgaggtcatacattccagattcccggtgttcagtaaaggctagttttcctgaagccccgttatactcataatccatcctaggtcaagtctacaccctacacaaaaatgttaataagtcctctctacaattgaagcagtcctgctccagtgaacttcttcacatcattcacatattgtgtagcaaggagagaagaataaattttacacttaggaagagtcctgtttcacaaactaatgcacgtgtgtccatcaccatttccttcctggtcttagtgttccttgcaaggtaaggcaaatcagatggccaaagtagtcacagtttctccagcctaaagcagattgtgagcagcccaactgctcttccttgccttcacttcttttgtaaatcagattgctcaggcaggaaagatgagatggcgtttcacctggtcagcactgggggagtgcagccagacatcacttcaaaatcactctgtgttttcttcctcaatattccattcaggccttctgtttgtgtgattactgcattttcctttcaagtcacaccttaactcccatcccatgtttctttccactgttacaattttcagattatagtaatttctttccagtgtgtttaatcttgagtaaatcaatatggctatactattttccatcagcctaattttaagtgaattgaacgttattttcatttggatgagagagggtttgggtaagaccacatagaaaacaacaatactatatcacattagtctgtattattatctttagccgcacatatgtttttacattgacctttgctgggatcattttcgatccaattcctggtgatctcactttgaggtccacagactgacacacttcaccaaaattgaaagaaaaggaaccagtatatcactaaatatttgacttttcctagtattattaaaataatcacacttcatgggaaaaatacctttgctcttatttaaatgcaaagtaattgcagatcttgaatttaaatctaggtcatcttgactctcataatatatctaatccaagtgtacacatttcttccctttgggtcctttttgggaaatacgacatatacggctaaggttaacaactgttgtcagaaaagcagctcttaatgagaaagattggtgtttcagaagactcctggaatgcaacttcctgttcttatgatatttgaaaaatatacataaaggctgaaaataattttgactaaaaatcaaaacaaaaatagtctcttggaaatagtcatcttctggctgaattaaatggccttgctcctgcagcacatgttgtctgccttttgtgaaatctctggctgcatggtaaggtgctttgcaccaggttcctggccttatgactaagcggtggcagttgtggaggggtgaagtttggggcattcactatgtcccatcttctctctcagttactctctgaacaggtggttcccactaataagactttgcttccagcaaaattgctgaaaaagacttgaatccctacatgcattcgtgtatttatacacttcattccaaaagaaaagggccatatgatgtttgcgtgtacgattcttggctcattccaggttgcacacaggttcagaaagtgaacctaactattgtaagtgcaaaggtcaagtgttaatgaccctgcttagcaactcctgaataatgaaattggtgttcaggaggaaaaaagggtctggaccaggtgaaatgctgagtaacggagggtgcataaaggaagaacgtttaacaccatgcacagacattccccttgtttataatctggggagaggcttgccctgcctgttggcattcatcctgaggacagatactctgtgaggaatctatctacttaagatcgaccaattttctaaccttacagatacacacacacatacacacacacagagagagagagagagagagagagagattgagagagagagagagagacttcctgtgctgccccatcccttggtgctttaattcatcgctggctgcttctccccaaagcaccaacctacaggttcctgctcctgaaagtatttcccggcctggttatggcttccttattttaactgatcattcagaacccattaccttccacagtctgcctgtattttgctcagtgaaattcacatggcaggttgcaaaatcctactctatttgtaagacagaagaaaattggatatcaaaaggatacattaggtaacagtgccttctggcctcaatggttcactcaagtggccttctggcctggacagttcactcaagtggctaactgtaactagctcattcattcacctatcaagtaattgttgtctactatgtgccaggccttgctctagccatgggaatacaataatgaaccaagtagtcatagtccatgctgtcgtgaagattatagtttcctaggggatactctaaaacagataaacagagaaaggaaacaaggggatttcagatgttatcacgattatcactatgcatgaaatcaaacaaatcaatgtactaagaagggagtggggattactttagattggatggccagggaaagattagccacagtattgacaggtggactgagattgagtgtaagaggggtctagccatgtatagtgtatgctcgctgtaaagcaagcagacatggaaaggagacagatgttcctttagcaaaataatgtcatgtttttttctctctcaagaagtagagccaaaatcatgttagtaaaaagaacattcttgctttgtgtgagatccaactgtgacgtatttataacagttagtatgtgccgaggcatggtgagttagcccttaaggaactgaggaggattcgagccacagcctttgctggtgcaggctagagtggaactggatcacacatgtcttcccctgagtcactgagctggaatccactattccccgtaggagccagcagcaacttgggcagcaggaaatctccattcatatctggctgaagttagaggcatcagaatttgacagatgcaagaagggtcagagggccaggatgacttgcttatgtgagaaggggtggactgtcccaaaggacaacgacgaggaagtgaagacagtctcaaaaaaatctcaaaaaaagactatgtgggcaaggtcgcccaatagcaggactacttaaaccccatcagagccagtgagccttctttctggataagatggaggtgcatgggggaaggaactcactttttggagcactaagtgagctggagcttgaggtggggtttatggacacagccctctgcctgacccccagccagtgaagagaactacacattaggagaagagcccctagggaagcagtaagttccttgactctatgggaagggacaggaaggagggtctataccttacaggggcccttgctccctgctgctctagcagctctggctagggctctggttttctgtggtgaggctgccattcagcattcaaagtagcagaaaggagactgaaaggtactcagaaacttgagtgtgcctgacatggcaaacccaaatgttgttaagagcatgagctctgggtcagcctcctttgatggacatgcttgcactgcctttaatgagctgttagacttttactgtaaagtactttttgagccttggtttcctcagctgttactgggatgatgacggcacctgtcccccagggttgttgtgatgattaaataagatggggcaaggtgaggtacctgacacagagaaggagctcagtagacatcacttcctgttcacttaggaagagagaattcttaccatttccaaaacgtagattttattttgcatcacactgccggagacattaacagacctcctgagattgatggacagatcaaatacaggacatccagttaaacttgaatttcaaataaacagtgaatacttttaaaatataagtatgtcccaaatattgcataagatatacttatgttaaaaacatatttattatttatctgaaattcaaatttaactaggcgtcatgtgttttttagttgctaaattgaccggagacacaattcatttcacacaggctctgcagcagctatccccaagctggattcattaacatcattcttctgtgcctcagtaggacttaggctagtgctgttcagcttgtaaggcagacaatcagtgtccccagaaccaaagagttggccctttgtataggcccttccttgagacataccttctttcccctagaaccttcctcttcaccaacatcaccaaccttgtcagtgggtatccctcgcctaatcctgctgctataaacaaatattttccaagtgtattcctccctcaccatcctgtctcttccttccttccttcattccttccctccctccctccttccttctttccttcattctttattcttactatttcacaagtggtttctttgctgtccctgaagtcaccagttacctagtgcttttttctctgcagctgaaaagtgcatttcaaactttctccacatttcacctgcatgcctaaagcatgcattgcagtcagaatacgcagcacctgtctatagaaagtgcattgctctttaatggatagccttgcccaacactgctcaatgtgctgtggtttccaggtgaagattagtaaagggcctggaagagttaagcaatgttcacctttatctcattgaaagttcacttcagaggggtaatttgtaaagaatagaagtttatttggctcacagttctggaggctggaaagtccaagagcatggggctgacatctggcgagggtcattccatcatggaaggtgagagggagttcaagcaaaagcaagaggaaatcaggcacactcatgctttttgtttgtttgtttgtttgtttgagatggagtctcactctgttgcccaggccggagtgcagtgttgtgatctcggctcactgcaacctccaactccctggttcaagcaattcttctgcctcagcctcccgagtacctgggattacaggcatgcaccaccacccccagctaatttttgtatttttagtagagatagggtttcaccatgttggccaggatggtctcgatttcctgaacttgtgatctgcccgccttggcctcccaaagtgctgggattacaggtgtgagccaccgcacccggccacactcatgctttttcaggatcccagtcccatgataactaacacactctcacaataatggcattcatccattcatgagagcagaaccctcgtgacctaataaactcttaaaggtcccatctcccaatactattgcattgccaattagattgcgacatgagttttggaaggggcattcaaagcatagcagtcctcttactagtccttcctttgcaggtaggaataataagcctcaggtaagtaagaaaattgcccaagaattgtcacaactgtaagagccagaggtggagttcaaacagggattcagactgtaaaaatcatgccctaacctctgggttattccaacctggccccatcagaacagcgaaggagccctttcttgtacccttacatttttgcactgcactatttcatcaagatctgtgttaaatttcatttctattacttttgtttacattctctctcctaaattactttaatctctaaatccctgttattacatttcttcctgttacaaccctggcttttctaaatatgtctaatatcaagtcatgattaaggtcctaaccctagcttacatgcccaaatcctgaaagcatcaaagcaaagctgcccaaggcag

SEQ ID NO: 101 - DNA, 185393 bp, Homo sapiens
gaattcttaccatttccaaaacgtagattttattttgcatcacactgccggagacattaacagacctcctgagattgatggacagatcaaatacaggacatccagttaaacttgaatttcaaataaacagtgaatacttttaaaatataagtatgtcccaaatattgcataagatatacttatgttaaaaacatatttattatttatctgaaattcaaatttaactaggcgtcatgtgttttttagttgctaaattgaccggagacacaattcatttcacacaggctctgcagcagctatccccaagctggattcattaacatcattcttctgtgcctcagtaggacttaggctagtgctgttcagcttgtaaggcagacaatcagtgtccccagaaccaaagagttggccctttgtataggcccttccttgagacataccttctttcccctagaaccttcctcttcaccaacatcaccaaccttgtcagtgggtatccctcgcctaatcctgctgctataaacaaatattttccaagtgtattcctccctcaccatcctgtctcttccttccttccttcattccttccctccctccctccttccttctttccttcattctttattcttactatttcacaagtggtttctttgctgtccctgaagtcaccagttacctagtgcttttttctctgcagctgaaaagtgcatttcaaactttctccacatttcacctgcatgcctaaagcatgcattgcagtcagaatacgcagcacctgtctatagaaagtgcattgctctttaatggatagccttgcccaacactgctcaatgtgctgtggtttccaggtgaagattagtaaagggcctggaagagttaagcaatgttcacctttatctcattgaaagttcacttcagaggggtaatttgtaaagaatagaagtttatttggctcacagttctggaggctggaaagtccaagagcatggggctgacatctggcgagggtcattccatcatggaaggtgagagggagttcaagcaaaagcaagaggaaatcaggcacactcatgctttttgtttgtttgtttgtttgtttgagatggagtctcactctgttgcccaggccggagtgcagtgttgtgatctcggctcactgcaacctccaactccctggttcaagcaattcttctgcctcagcctcccgagtacctgggattacaggcatgcaccaccacccccagctaatttttgtatttttagtagagatagggtttcaccatgttggccaggatggtctcgatttcctgaacttgtgatctgcccgccttggcctcccaaagtgctgggattacaggtgtgagccaccgcacccggccacactcatgctttttcaggatcccagtcccatgataactaacacactctcacaataatggcattcatccattcatgagagcagaaccctcgtgacctaataaactcttaaaggtcccatctcccaatactattgcattgccaattagattgcgacatgagttttggaaggggcattcaaagcatagcagtcctcttactagtccttcctttgcaggtaggaataataagcctcaggtaagtaagaaaattgcccaagaattgtcacaactgtaagagccagaggtggagttcaaacagggattcagactgtaaaaatcatgccctaacctctgggttattccaacctggccccatcagaacagcgaaggagccctttcttgtacccttacatttttgcactgcactatttcatcaagatctgtgttaaatttcatttctattacttttgtttacattctctctcctaaattactttaatctctaaatccctgttattacatttcttcctgttacaaccctggcttttctaaatatgtctaatatcaagtcatgattaaggtcctaaccctagcttacatgcccaaatcctgaaagcatcaaagcaaagctgcccaaggcagaaggacaaaaaaaaaatggaaatgttatactagcatttcagcaatatgtttggagcccccacgaagagtcaaatgctgtgcagtgcatacaaagatatccccctgttctctagatggggtctgctgatgtcacttttttgaaaagggatgttgtgttctcactgtgaatttatccagagatcactgctgttgagttactgctgttgcagatggctcctgcctagtagcattctgtgggcattttaagtccagagggaaagtaggtttttctccacaatactttaggcattttcacagtgacagctttaagagtgttcttaggaaaaggtcactggttatcatgtcttttgtcggcaagtatgtaggaaagaataagccttgaagttcttttcaaaggtcgttcaactctggacctggctaatgtccccacagctgtaggccttgggccaaggacttccagagcactggcaggccatctgcaatgccctcgttaaaggagtgggccccagctgttgtgggaagccatgggagagactggggagaagccaatctcatgggcaaaatgatctgccttctcttggatcacagtacccaaggatatttgttaactacctcgaacctactcaaccttctctgtgttgtatgagcaaaattgtacttggatgcttatgggaaatgagtcaccatattcattcattcttcctgacttccagcaattcatttcattttataaatccttattgactgcctactatagacaagcactgtactaggaacatgggatacacatgatgaatgtagtactgtgatttcagctcactgtggaaaacaaacaaaaacaagcagttcattataattagaagcatatttactatgaagttaatgaaacataagctgtgaggtctctcacttgcctttcaaggcccctaggggatgtgcatatggaaagaagctggggagcaggctagcaatttatccataagctcacatgtttttgtaaagtttgagaaatgcaatatttttttctttttcttttttctaagaggaaccatagtttacaaagcaatacatatttgcattatctttcttaaagaaaattctggcaaatatataaccttcattctgcttacaatgcaaggagccatgcatagattaccacctaccaacaggagcaaaaacttcattctggccctttgtggaaaggtaaatgtgagacatgtcaggcacttgttgtaaacaaacctgttctcatttgcctagtttcttgcacaactgctctaggttttcttatatgcaaataaaagttgataacactcagctggggtggcagaggaacctctctatcattcaaaagtagaattcaaaagtaaacatgagagcaacacattgttcactgaaaatctaccagtttagcttccctgccttccttgccacagagagaaagaagggagggaaaaaagaatgatttgcaaagcagcattaatattattctgaggccaggtgaattgggatgtgggtgagatcttgagatgaaagttcagctgcaagaaaatgaaaaagcagccataatctcaggacccactgaggaggcagggctggctacagggtaatgggctggagggaaatgatgggagattacagcaaaaccaccaggctggctagcagcaaccaaccacaatggcaaggatgtagatgttatcatcaactccacagcagagaagccagctgtgttctggacattttaggttggtgattttgagcccaatttcattactagaaacaccatcatctctgcaagagaaaaacatgacaataggcaataagcagtgttaggggctgaattatgacccccaaaattcatatgttgaagccctaaccctcaggacctcagaatgaaactgcatctggacatagggtctttatagagatcacgtgattgaaatgaggtcattaggacacactccaatccagtatccagcgttcttattagaagaggagattaggacattaacacacagaaggaagaccatgtgaaggcacagatcgactatggctacctgaaagtcaaggaaaaaggcctgaggaaaaaccaacatggctggcaccctgctcttggacttctcagcctccagaactgtgagaaaacgcatacctgttttttaggccacccagtctgtatttgtgatggtagccctagcaaacaaataacagcagttactgacttctgcatttagtctgtccatccagtgacaatggagctccaattcaagagtagcccccaagaaaagaaatcctggatgatcctgaacaagtgaggcacttgccacttttcctggtacttctactctgtgtgcacattggactttgcagttttgccttaatatggcaaaactccacaatttaccaatatgaattttgtgagactgaaaccagtcagaggaaaaacttcattccaaccatgtatgttttctagttataaaaacagtaatttgggcctgggcacggtggctcatgcctgtaatcccaacactttgggagtccgaggtgggcagatcacctgaggtcaggagttcgagaccagcctggccaacatggtgaaaccccgcctctactaaaaatataagaattagctgggcattgtggcacgcacctgtaatcccagctactctggaggctgaggcaggagaatcacttgaacctgggaggtggaggttgcagtcagccaagactgtgccattgcattccagcctgggtgacagagcaagactctgcctcaaaaaaaaaaaagaaaaagaaaaaaaacagtaatatgatgacatggagtaccaaagacttgactgatgggtagactgacagatggttagatatgtactatatagagatagaaatacattttcccattttgttaataaaataatttatcatagaaaatttagaaaacagaaaaaataggaggaagcaaagcaaataatgcacagttccaccagccacatatgaccatagttcacagttgggcatgtgtcctttgtggagagtgggaggagaaggataggaaaaaaatatgacttaacaatcccaatatcaaataaaagaaactttagcattttgttgttattcctcatggcttttttcccttttgcttcttatacaaggttgtgatcacacaaaatatactgatctggaagcagaattaatgttctgaaaatccataaggggaaagaatcaagcatttacattgcctttcctatataaactgtattttaagagaaatagctgatgaaggaaagttcttttttttttttttttttttttttttttttgagacgaagttttgctctgtcacccacgctggagtgcaatggtgtgatcttggctcactgcaacctctgcccccccaggttcaagtgactctcctgcctcagcctcctgagtaactaggactacaggcatgtgccaccacgcccagctaatttttgtatttttagtagagacagagtttcactatgttggccaggctggtattgaactcctgacctcaagtgatctgcctgcctcggccttccaaagtgctgggattataagcttgagccactgtgccctgccaggaaagttcttttttataaaagtagagaagattggtccccatggagtagctgccttagctggtcatggaagttccgcccactgctcccacttgctctctgtggtctttcttgttccctgatccgcaggcaggatggcctgcatgcaggtggactactcagacaaatactttgaggagcactatgagtactggcacaccacactacccaaacaaactttgttaaagtttgtatgtggcatttaaaacaaaaaggtagaaatgcaagccatagactgtagactgaaagaaattatttgtaaaacatatgtttgataaaggactagtatttaaaatatataaagagctcttacaacacaataataagacaatttaaaatgggcaaagatttgaacagatgcttcactaaagaagatatgtatcatatatccatagcaaataaatacataaaaatgctcaacatcattactcattagggaaatgaaatttaaaatcacaacaagatacctctacacatccatgagaatgactaaaatttatttttgttttttgtttgtttgtttttgtttttttgagatggactctcactctgtcgcccaggctggaatgtagtggcctgatcttggctcactgtaacctctgcttcccgggctcaagcaattctcctaccttttttttttttttttttttttttcatatttttagtagagatggagtttcaccatgttggccaggctggtcttaaactcctgacctcaagtgatcctcccacctcctcagcctcccatagtgctgggattacaggcgtgtgccaccacccctggccagaatgactaaaacttaaaagatgaaaaataatgaatgctagcaaagatgggaagcgataagaactttcatactgctgttcagaatgcaaaatagtacagccactttatgaagtaaattgtcattttcttgtagagtaaaacatatgtttaccaaatgacccagaagttcctctcctaggtatttacccaagagaaatgaaaacatgtgtcacagagagatttttatgcaaatgattgtggcactttattcctaatagttcaaactgaaaataacctaagtgtcaatcattggatgaataaaaaataaattgtaatatagccatacaacaaatactactcagcaataaaaatgaataaaactactgatacatagaacatgggtgaatgtcaaaagcattatgctaagtgaaagaagccagacacaaaaggctacacctgtgatgacgtgtatatgaaattctacaagacgaaaaccatagtgacataaagcaggtcagtggttgttagggaccaaaaatgagggaaaggggattgttgactgcaaagagatatgaggagaatattttcaatgctagagctagtctataactgggtcgtggtgctgtacatgtatatatgtttgtgacgataccacatatactatggtgcttatatacacatgtgatgttatatactgtatatatttgccaaaactcattgaatggtacacttgaaaagggtgaaatttattttatgcatattacactttagtaaagctgatcagacaggctgctctgagaagtcataataaatggggggaaaatggggatagcagaggcaaaaatatttaactgctttcagtattcatatttagtagtggtaaagttcctatagctattctaaaatggtttggtgtgtaaggtggggtcaaaccagtgagtaactgtggattattcttacccaacttcccctgtttccttgaaaaccgacacaagattatcagtacagaatatatagatgcaatagagaagaggttaagtaaaacctcaagtcctaaattgatagatatatcagtatgaacagataaagtactttatttgtcaactaaaatgctatggaaacaacaacccagttttgaagaacaccccaacacccaatctctcatcctgaaattccatttcccatgaatagaagccaggatttcttggagaaatgttggtactaggcctggggtgggaaaggtatgagataaacctggagcatcttgtcacacctgacagtgaataagctatcaaagacttctggggtcatgtcaactctattcagaaaccaatttaaagaggctcccactggcctaggaagggagaagtgggcttcaaaatgataagaattacattggattaaaagcacacagatatatttaaatgcatgtttataatgatgtttaaattaaaaaaaaatgttcacctgaagatgacagggatctgatttattgcattgaaaaatggtaaataaaaagaaaaaataagcatttttcttgcctttctgatatgaactcatttggcaaccaaaaagcagatgagaaaagtctctttacaaaattgttccagctaataaatgaaaacaaaatgataggactagaatatcaccattcatctactcaaaaaattcattggattgaggtatttgccatcaacagcagctaacatcaaaataaacagcaaaaatgagacattttctgtctcctgatgaaagaacacacccccattctttatagttttgccagagggttcaaattcaagtctgctcaaatctctggaaccaactgtcaagtgttaggaaatacaggggagagaagaacaggctgagctgcaccatgggcatgcaatcagcaatgccagaccatgggaaactctgggaaatatgccagacagcccaggttctttcacagatacattataaggaaaagaaagtaatggaaaggaagcctggagattaaaaaagacttagtgacatttcaggtttaaaaaaaaactaggaagactaaactttggtgtcttggttaatgaaattgtaaagaaacacgaggaagtaattactacaaaaatcaggctagtgattatgtttagagtgcattataggctgctgaaccttttctccccaaattcatgtgatgaagttctcacccccagtagctcaggatgtatttggagatagggtttttaaagaggtcattaaggttaaatgaagtagtactgaccacctcatgggatgtgggatgaccacgtcaggacacagccagaagagagtcatctacaaatcaaggagaaaggcttcaggagaaaccaaacctgctgatttcttatcagggacttgtggcctccagaactgagagaaagacatttctgttgtttaagcctcccagtccgtggtattttgttacagcagccctagcaaattaactcagagggagatgggagttctgattggatgggacacatatagggcatattggggtggctaacaatgtttggtttcttgttgtaggtggtggttacaagggtgtttgccttataataattcctaatccgtacattgctttgcgtgtttttctgtgtctgtgttttattttacaatgaaagggctgaaaacaagaatggaaacaaccattagttggaagcaaagattatccaggccacagagttgtgtgacttggattagggtggtggtagagggtttgcagagaagtgggtagattcctgacatgttttctagataggaggatgtgaaagagggaggggacaaagtagctgccattggggatgggagtgggggagtgggtgaggatttagaggaaaccagattgctagtaagttgaaaactgttaaagccaggtgatggggatatgggagcttattatactattctatttttatatgtgttgaaaatttttcatgttaaaaaaataaagtgaggaaaactgacagtgagagactgaaataaagttgctctatcattattttccatgagttgtgcctatttactattcagttgtcacttacaatcttagcccattttttcccatgtgcttttctgctcttgtttcattgagttccattgcatcctgttgaggatgctcaatgggtctctacaatgttccaatgttcctctgattctggtagtaaaacattttcaaagatcctctgagtctttaggataatattacatttttcttctttgacaatatcctttgcctaggctttatgtgactttcttttcccctctaaggtttcattgtcaagtaaggggacacctatccagacctgtgctttctgatagaatgggatgggaagatggtcactggcgacattctctgtccatctggattctgaacctccgtttcagagctacagctcaatggcatttatgtaaatgatttctaggccaatacctggtgtctgttattttggcatttttttttagagcagccaaatatgtatcccagtgagtacacttgagtaattacatgccttttcattcttatcttagcatcttaggctccataatcactaacaatatgtgcaattctttcttgatgcatacatggagaccccagagaaggaattctctctttttcgtgctggggtggttgcatacatttgtgaaactgagcaattggaagagaaatgaagctgggagccactttcagccaatttgttaggggctgccccatttcatcacgtagctgtaaggttcttaggctggtactgcatgtggctcataaaatgtattcaagtttagctagcccagaggataccacacctccagcatcccccatccatgtaccactcatccatcatcagacactttaaaacttgcttgtagacattctatttcctgagtgctgctttgccaggatcctggagctatgagcatttacccagtctgttagaaacagttacactggtcctaagactttgacaatagcctaataaaaactccagttccactgtaatgagatgccactttatgcctatgaggatggctataataatactaattcccactctacctttaattcccctctatcccctattcagaaacagaagccatatcctctgcagaaaatgcagtagttatctcccttaatcttggatgctgctttttaaggcagccagactaatattttcttccccaatctatacactgcccccttcttcagcaatgacaattctctaaaagtaaatgagcatagatcagggcctggaagagaaagtggaggaaatagactgacaatttgtatccttagacacataaattaaggtaggataggcacagtggctcatgcctgtaaatcccagcactttgggaggctgaggggggagaatcacttgaggccaggagttcaagaccagcctaggcaatatattgacaccctgtctctacaacatttaaaaaaaagaaaaaaagaaagaaagtaagaaagaaaaaaattaaagaaaaattctgtatgggaaggagaaaaaagtaccctgaaacatactagggattatattttttcacttacttcctctcttcagtcactcagaaaagttagtaagaggaagagaaaatcctatttcagcctccttgtacctcaggagaagagaacagaggtgatgttgaaaatatgtaaccactggaatggcatgggcatggatcatgcagaagagatgctagccataacctggtctaacattaccagtgagcattgcctcagtgtgccttggatgagagctttttagactccgagaacggacccaggagctatcatctggctgacagatcttcaccccaattacctgagtgcctgtatttcagtcttggtccagcattggctggacctgagcctctggcttgtcccaatgattcttttcctcggtgcatacagagaaggctggtcattatcacacaatccactctcccttttttctatgataaggagtaacagaagttgaaaatccagtcacccagccaaggattccatttcctaccatctcttgcattgttgtgcgactaggtcatcacctatgggatgtgagccaatgtcctgacgttaaaaggggtggaagatgccttcctcttgcctagttctaccatttgcttggctggaatgtggaaatagcagtgaaagctgagatagccatcttggccacaggacagaatccaagtgttgacaaccacagagcaactacagaaggaactttgttctctgaaggttgtggaactatgatatccctctctaagcctaaataccatcattatagcatcaactgcttaactctccttaagtgcagcaagggaacttcagcatttaaactctatgcaaatgacgacacacataccatactctatttggcaaagatgacctgtaatgtgtgcaggaatcacctgggagtcttgttaaaatgaagtctgtttcagtaggtctgggctgaggcctgacattcagcatttctcacaagctgtgatgccagtgatgctagttgggtcatgtcctggatctaaagcaatgaacctgagttcgagatgagcctggtgaacatagcaagatcccatctctaaaactaaaaaagaggcaggtgcacctatagtcccagctacttgggtggctgaggcaggaggatggcttgagcccaggagctcaaggcatgtatcagtagcggagctgggcaggtaggtatcagagaagttaccccttgagctacagtctatcaaaatgcccccttctcagtaaggcctcaccaggccattttctttaaaactacatttttctttagaactacaaccataccctgacaactccctgctttatttccctcctcacctgcaccttggagagcttgtaaacatccaaatgtcatgcattacacgtgttaattttgtttatttgctgtctcctccctgtggaatttaagctacagtctgcatggagtgaatgaatggcagccaggtgaagctcagtaaatgtagaaacagaatgcctgcaggtcggcaggcatgtggtccacattgtcaacatcagctggggggagggatcagagatagaaccacgcctttctgcagccctcagacacctcaaataatgcagtgatcttatatataagactagtcctcaaaaattactcttccaatcctcctaccacttctgttaatcctcatttatggagatctcacttaccacagagagccagccccttcccggcaactctgtagggcaaatattatcagccccattccatagatgaaggtactgaggctttgagaatgtggatatttagccaagaagcagagtgcagaactaaatccaattctatttagtgtcaaagatatgagggttttgatgtgagaggacctcaggctgcaggtcaaataactccagtgttggaaagtaaggctggagaggctgtggaccaggtgatgtgtgtatcttcctggaatctccaccccaggtattccttctctgatgactggccttaggaccctcttccaagcaactcctctgggaccctgctggcttatctgacccgtgttttggctgctgttccttgtgtgaaacatattattctaatgatgtctactccccacccccttcaactcttcacaagtctgtcttccagcaatgtccgtccactgggcccacctgatagtcccctctccttgtatcaccctagagtgatgctcggcatagagtgtcactgtgacagcaaaaaagcatagatgaagagaactcaacgcccccgccgccccactcctcacgcttcctgatacattagggaacaccccttaagccataattgccgctggtgtcagtaaacattttaacaggcaaaaacatggccactgcacttctaagggaatctgagtctgtaaatgaagagaattctgtcgatactcacttccatccaattccacaaacaagcattcatggagtgcctgtctgctcaggggctccacctcttggggggatagggggtgggaggagggagtccttaaagctaaggaaaggatttctgcattcagcttcgctccctgcccccagcctgttaggaaagcttgcacaggtcctcaaacagaatcccgcacctgagacctgcaccttccgaccagcgagtgctctgcctccattatgaaagtgtctctgcaattacagtgacaggtggagagtgcctgagagacaacctggctctccctcttcctgggagtgacacataatcatgccctgcatttagagagtgcccttctctgaggaactcgaatggccttcttgacataatcgcattcattcttccaactgccttatgaggccgaccagggacaggtattctttgctaaccctgcctgccccatttctagaggagagaagtgaggccccaagaaattaaagtcaaaatgagactatcagcaagcgagtaataaaacctgggtctcctgacccccatcccgcaaacctcccgttcctcccttcctgtcagcctgcacacaagtgcggatgtttatgtttctacacaaggacttttaaaaaaggttagctttgtgaatctgtgcttctccgagtaggacaaggtgagccagcccaaatagagaattcagggtttaaaataaataagaagcaaagagaagattgagagagggcagaaaaggggggatgggaggcccccaaagctcagaatggggtctcagttgatggtaacatctgaaggcataggtgtgtgctttatatcaggcatggaactctgtgcataatgttccacgattcagacacaaggactgatgccttgtttagtcttcagggttcgttggttttgagaatattcaaaacacaggcagatggccatggtttatggttctgcactctcagctgtggctgctcaggtgtccaggttgttgataaacaaggaatagaacacggcattgaatagaacaatgacagtgataacagctaacatttattgatcacaagcataactattcacgttttatcatatttgatcctcccaacaaccttatgaggttgtactgttatctcattttatgttagagaaaactgaggcttaaagaatatggctgatgagcctaatatacttagcctgacttttctctaataatcccagagtcatttaaatgtttctgcaaggaaagactgaaaattggtagagcagaaagtttcctaacagtcattggattttttttttattattatactttaagttttagggtacatgtgcacaatgtgcaggttagttacatatgtatacatgtgccatgctggtgtgctgcaccaattaacttgtcatttagcattaggtttatctcctaatgctgtccctcccccctccccccaccccacaacagtccccagagtgtgatgttccccttcctgtgtccatgtgttctcattgttcaattcccatctatgagtgagaacatgcagtgtttggttttttgtccttgcgatagtttactgagaatgaagatttcgaatttcatccatgtccctacaaaggagatgaactcatcattttttatggctgcatagtattccatggtgtataagtgccacattttcttaatccagtctatcattgttggacatttggcttggttctaagtttttgctattgtgaatagtgccgcaataaacatacgtgtgcatgtgtctttatagcagcatgatttatagtcctttgggtatatacccagtaatgggatggctgggtcaaattgtatttctagttctagatccctgaggaatcgccacactgacttccacaatggttgaactagtttacagtcccaccaacagtgtaaaagtgttcctatttctccacatcctctccagcacctgttgtttcctgactttttaatgattgccattctaactggtgtgagatgctatctcattgaggttttgatttgcatttctctgatgaccagtgatgatgagcattttttcatgtgtcttttggctgcttaaatgtcttcttttgagaagtgtctgttcatgtccctagcccactttttgatggggttgtttgtttttttcttgtaaatttgtttgagttcattgtagattctggatattagccctttgtcagatgagttggttgcgaaaattttctcccattttgtaggttgcctcttcactctgatggtagtttcttttgctgtgcagaagctctttagtttaattagatcccatttgtcaattttggcttttgttgccattgcttttggtgttttagacatgaagtccttgcccatgcctatgtcctgaatggtattgcctaggttttcttctagggtttttatggttttaggtctaaagtttaagtctttaatccatcttgaattaatttttgtataaggtgtaaggaagggatccagtttcagctttctacatacagctagccagttttcccagcaccatttattaaatagggaatcctttccccattgcttttttttctcaggtttgtcaaagatcagatagttgtagatacgtggcattatttctgagggctctgttctgttctattgatctatatacctattttggtaccagtaccatgctgttttggttactgtagccttgtagtatagtttgaagtcaggtagcgtgatgcctccagctttgttcttttggcttaggattgacttggcgatgcgggctcttttttggttccatgtgaactttaaagtagttttttccaattctgtgaagaaagtcattggtagcttgatggggatggcattgaatctataaattaccttgggcagtatggccattttcacggtattgattcttcctacctatgagcatggaatgttcttccatttgtttgtattctcttttatttccttgagcagtggtttgtagttctccttgaagaggtccgtcacgtcccttgtaagttggattcctaagtattttattctctttgaagcagttgtgaatgggagttcactcatgatttggctccctgtttgtctgttattggtgcataagaatgcttgtgatttttgtacattgattttgtatcctgagactttgctgaagttgcttatcagcttaaggagattttgggctgagacaatggggttttctacatatacaatcatgtcatctgcaaacagggacaatttgacttcctcttttcctaattgaataccctttatttccttcttctgcctaattgccctggccagaacttccaacactatgttgaataggagtggtgagagagggcatccctgtcttgtgccagttttcaaagggaatgcttccagtttttgcccattcagtatgatattggctgtgggtttgtcatagatagctcttattattttgagatacgtcccatcaatacctaatttattgagagtttttagcatgaaggctgttgaattttgtcaaaggccttttctgcatctattgagataatcatgtggtttttgtctttggttctgtttatatgctggattacatttattgatttgtgtatattgagccagccttgcatcccagggatgaagcccacttgatcatggtggataagctttttgatgtgctgctggattcggtttgccagtattctattcaggatttttgcatcaatgttcatcaaggatattggtctaaaattctcttttttcattgtgtctctgcctggctttggtatcaggatgatgctggcctcataaaatgagttagggaggattccctctttttctattgattggaatagtttcagaaggaatggtactagttcttccttgtaactggtagaatttggctgtgaatccatctggtcctggagtctttttggttggtaagctattgattattgccacaatttcagatcctgttattggtctattcagagattcaacttctttctggtttagtcttgggagagtgcatgtgtcgaggaatttatccatttcttctagattttccagtttatttgtgtagaggtgtttgtagtattctctgatggtagtttgtatttctgtgggatcggtggtgatatcccctttatcattttttattgcatcgatttgattcttctctctttttttctttattagtcttgctagcggtctatcaattttgttgatcctttcaaaaaaccagctcctggattcattaattttttgaagggtttttttgtctctatttccttcagttctgctctgattttagttatttcttgccttctgctagcttttgaatgtgtttgctcttgcttttctagttcttttaattgtgatgttagggtgtcaattttggatctttcctgcattctcttgtgggcatttagtgctataaatttccctctacacactgctttgaatgtgtcccagagattctggtatgttgtgtctttgttctcattggtttcaaagaacatctttatttctgtcttcatttcgttatgtacccagtagtcattcaggagcaggttgttcagtttccatgtagttgagcggttttgagtgagtttcttaatcctgagttctagtttgattgcactgtggtctgagatatagtttgttataatttctgtctttttatatttgctgaggagagctttacttccaactatgtagtcaattttggaataggtgtggtgtggtgctgaaaaaaatgtatattctgttgatttggggtggagagttctgtagatgtctattaggtctgcttggtgcagagctgagttcaattcctgggtatccttgttaactttctgtctcgttgatctgtctaatgttgacagtggggtgttaaagtctcccattattattgtgtgggagtctaagtctctttgtaggtcactcaggacttgctttatgaatctgggtgctcctgtattggctgcatatatatttaggatagttagctcttcttgttgaattgatccctttaccattatgtaatggccttctttgtctcttttgatctttgttggtttaaagtctgttttatcagagactaggattgcaacccctgcctttttttgttttccatttgctgggtagatcttcctccatccttttattttgagcctatgtgtgtctctgcacatgagatgggtttcctgaatacagcacactgatgggtcttgactttttatccaattttccagtctgtgtcttttaattggagcatttagtccatttatatttaaagttaatattgttatgtgtgaatttgatcctgtcattatgatgttagctggttattttgctcgttagttgatgcagtttcttcttcgtctcaatgggctttacattttggcatgattttgcagtggctggtactgattgtgcctttccatgtttagtgcttccttcaggagctcttttagggcaggcctggtcgtgacaaaatgtctcagcatttgcttatctgtaaagtattttctttctccttcacttatgaagcttagtttggctggatatgaaattctgggttgaaaattcttttctttaagaatgttgaatattggcccccactctcttctggcttgtagagtttctgtcgagaaatccgctattagtctgatgggcttccctttgtgggtaacctgacttttctctctggctgcccttaacattttttccttcatttcagctttggtgagtctgacaattatgtgtcttggagttgctcttcttgaggagtatctttgtggcgttctctgtatttcctgaatctgaatgttgacctgccttgctagactggggaagttctcctggagaatatcctgcagagtgttttccaacttggttccattcttcccatcactttcaggtacaccaatcagacacagatttggtcttttcccatagtcccatatttcttggaggctttgttcatttctttttattcttttttctttaaacttcccttctcacttcatttcattcatttcatcttccctcactgataccctttcttccagttgatcgcatcggctcctgaggcttctgcattcttcacttagttctcgagctttggctttcagctccatcagctcctttaagcacttctctgtattggttattctagttatacatttgtctaaagttttttcaaagttttcaacttctttgcctttggtttgaatttcctcctgtagctcggagtagtttgatcgtctgaagccttcttctctcaactcgtcaaagtcattctccgtccagcttcgttctgttgctggtgaggaactgtgttcctttggaggaggagaggcgctctgctttttagagtttccagtttttctgctctgttttttccccatctttgtggttttatctacttttggtctttgatgatggtgatgttacagatgggtttttggtgtggatgtcctttctgtttgttagttttccttctaacagacaggaccctcagctgcaggtctgttggagtttgctagaggtccactccagaccctgtttgcctggatatcagcagcagtggctgcagaaccatggattttcgtgatccgtgaatgctgctgtctaatcgctcctctggaagttttgtctcagaggagtacccagctgtgtgaggtatcagtctgcccctactgggggttgcctcccagttaggctgctcgggggtcaggggtcagggacccacttgaggaggcagtctgcccgttctcagatctccagctgcatgctgggagaaccactgctctcctcaaagctgtcagacagggacatttaagtctgcagaggttactgctgtctttttttttgtctgtgccctgcccccagaggtggagcctacagaggcaggcaggcctccttgagctgtggtgggctccacccagttggagcttcccggctgctttgtttacctaagcgagcctgggcaatggcaggcgcccctcccccagccttgctgctgccttgcagtttgatctcagactgctgtgctagcaatctgtgagactccgtagccataggaccctccaagccatgtgcaggatataatctcctggtgcgccatttcctaagcccgtcagaaaagcacagtattcgggtgggaatggcccgattttccaggtgcggtctgtcacccctttccttgaccaggaaagggaactccctgatcccttgcacttccctagtaaggcaatgcctcgccctgcttcggctgctgcacagtgcgctgcacccactgtcctgcgcccactgtctggcactccctagtgaaatgaacccattacctcagatggaaaggcagaaatcacccgtcttctgcgtcgctcacgctgggagctgtagaccggagctgttcctattcggccatcttggctcctcccccccgtcactggaatttttgattcccgagaaagcaagtgaaatgattagtagtcaatactgggaagcatacctcgctttaaaaaatgtagtgacagttttcctattagagaaacttcaaccagaaaatgatcaccctaatgaaaaattcaaacatttagataagttctgtggaggtctaatataagttgattttcctttagttcttggaaaataagttttaaaccaaatgacacaaatagtattttaaaaagaaatttgcagtagcaagactgtaagcctgttgaggttagcaaatgtatcttggatatctcccaggacaggtacttacctttcccttgctctgcacctggaagggtttatgagcacttggtacagttgcaaaggcctgccaggtaggcaatttgagagagttggcagaccattagattaagagtcaggtggccaggcatggtggctcatgcctataatcccagcattttgggaggccaaggcagatagattgctcgaggccaggagttcaagaccagcctggccaacatggtgaaaccctgtctctactaaaaatgcaaaaattagctgggtgtggtggtgcacacctgtaatcccagctgctcgggaggctgaggcatgagactagtttgaacccaggaggtggatgttacagtgagcggagatcatgccactgcactccagcttgggtgacagagcaagcttctgtctcaaaaaaaaaaaaaaaaaaaaagtcaggagaccttaggcaaaacacttttcttctgtggacctcaatttctttagctgtataatggggggttaactattagtgcataactccaggaacttactctggagtacagaaaatgttgctgctgctaaacctcaagggaaggagagatgcctagttcatacactacccttctagtgctttcattccataaagatcacagggtccctctgctgctttactacccattaataaggccaggaaccccccactgcccccaaaatagacttgttcaatgtcacattcccatgataaatgtgcttagcacatagcagctattcaataaatacttgtaaagaaaaaactgaatgaatatttgcgaaagagtaaatgaatacacggacatctttgggaaatcaaggaataaacatacctttgattacaaagaatccaaagcttttcctcaagatattcacagatcttttaaaatttgatttaacttagacagtaaattgaaagatatggaatacaaatggccaaggagaatatgaaaaagttgtttaatctctagcaatgaggaaaccacaaattaaaacagtaacaaaatttttttatttaattagggaaaaaattcaataagggaggagatgctattgatagatatgtaatttgataaagaccatgcaggacaatttgatgtttcgctcaaaagtaaatgtgaataccatttagttcctcttctggctatctattctataaaaacacccactttgtacccagagatgtgtataaaggatgttcattacagcattctacttaatagtgaaaaactaggaacaatttaaatggccaataggggagtgccttcatcagaatatactagattatgctatagttaaaaaataaaaaatcagtggcttaacaaagactttctacaaagtcttctctgaatctaggcaactcctggggcaacctctattcatgtcaagattcagcaatccaggttctcttgatcctgtggctttatcatctcaataggaggccttctttactgtggcagggaacagagggctagaaggtcttatacctgcaatgaaatactggaacgcaaaagtgatacaagtcacttcttctctcaacccaccggctagagctagtcatgtggctccaaatagcttcaataaaacaaacagtagaattctctcatgtgtccaagggaaagaagaactagatataggtgagcaccagaagtctcacacccaggaaaaggctaaatcatatatccatgctatggaatactatacagctatttaaaagcattaggcagatctatatttagtgattttttaaaaaagatctaagacttcaataagcaaatatcttaagcaacttgatctcccttatattaaaaatatgtttatatatatttgtatgtgtgcaaatgaatagcaaaaggtttatgtagaatgatacagtccaacagtggttatctgggagcaaggagttgattggaggaagactcagatgaaggggactttcaagtttccctgtgtattcttctgcattgtttacctcttttaaaatgaaattgtattcacataatttaaattgcttttacatttgtaaaaagtaagtaaacacatctggaaacctatctcctctagcagctctttaataggctttgagatttttttttccaaaaatgcaaatatataaattttagcaaaatagttgcctgtattttgttgtcatagccagaggcacttagtcacagaaaggacttagaatatatcattatcttcagtctataccctggaaacagaatctgactctgaattgttggcacatgtctgctgggcagttaggagcaatacccatgagtggtgacagaagccagcctggacaccgagagagactgaaccgtcacatagtcacaatggaggcctcggtggatcggattgaccactctgaccttcagaattgctctgccttgaggcaactgccccatccccatccagcagctcttacttagctggggctgccccagggtgtgggtgtgacagtgaccaaggacctcccagagaggactaagctggatgcacttcagccaccaacacagacagcaactggggcaatgagagtcccagcttgaagcggggatctggactgttcttcaccaaggatcccactaccatcacatccccaacttcacccagagagtgatagtttaactaatggcatagcaagagcccaacctggggagtagaaaactgggccttacctagcacatagcatacattcagcaagtatttgtttgatgaacaaatgaatggcgctatccttggaccaggctcacagaagcctgaggagcctgtgagagtggatcagggaataggatccctaaagcagagtctccatgcattgcagaaacaaatccaggtgagtctggacctcagactctctaggcctcacccttttgatttctcacattattctcacaggcatggaaggagggaagacctggaggttgcaagaggctgataagccagcctgtgatcatccaggcttccagctcctcctcttccccttccttccatctgccccatctggtcatttctctgctcctcagcactttcttctaagggcatccatgggaagaaggagataaagctctagacagatgctgtgccactggagggtagccctggagaaaatattacagctattaaaggagagttggctcctattgactcctaagacaccagctaattattggttaaaatgggttgaagtccttggaatgttctaggccagggcttctgaaacttaaatgtgaatacaaaccatctgtgtgtcttttaaaaatgcatattctgatttagaaggtctgcagcaaagcaaagtttagtttttttgtttgtttgtttttattttgagatattttctcactctgtcacccaggctggagtgcagtgacgggatctcagctcactgcaacctccaccccccaggttcaagtgattcttgtgcctcagcctcctcagtagctgggattaaaggcactggccaacacccctggctaatttttgtatttttaatagagacagggtttcaccatgttggccagactggtctcgaactcctggcctcaagtgatcctcctgcctcccatagtgctgagattacaggcataagccaccacgcctggccaagattctacatttctaacaagctcccagataatggatgattcctatgctgcaggtccagggactacactttgattagctgaggccttagagaaggagaatacagatatgtgtcactgacttaagagtcaaaattatatatcatcatcaccacctgaccactaacaccttgttgtgctaaatgctttgaacactttttctcacttgatttttaaagagccctcaaaatagctattatagccatgccccatttacagaaggaagaagtgagaccagggatccttagtgaccagctagcatgtggtaaagccagcactgcaacacaagtccatcagagtcctggtcctgggttcttcaccacttcacaggagagagagcatagctttgaagcagtctcttctgtgattatgtcttcttggagggacctcggctgggccccagcttgctaagaagagaaagccactggagtctttgtgtcgtctctagacagggagatgatgacggttcgcggaatagctaatagtggatcagccgcttgtgcttagctgcttccctggtgcttcgggcagcatcttccagctaaaggaagggctccacgctgagccatccagaggattcctggctgcaagtccctggccggcagggcggccactgagcggtcatcaagggcgcagcgctgagccctggcatggaaacgccgcctccgccacgcccacgtccccaggctcagctgcatgctcattgcacagggtcgctgcactgagctcagctgagagattgcttagctcagctttgaaatccaacctaaattcaccccctgggcctgcagacactctggccagatgctcttccccaaccagagctgggtaatagaaggtgacaggctgaacgcggggacttgggggcgtggctgagcggctgacagctaagagctcttctccccaaacgctggacgctgaaggctgaaggctggagctgcgttcctgcgctttttgaggtgcacagctgcaggatgggggttcagatatgcacccagggggatcaggaatttcatctctttttctggcctaaatgttccagtgtcttcacatgcggggagtttatttgccgtaggtagctcctactcccttgaggagggaaaggatcccacccgcatcttcagagtccactgccacaaaccctgacagagttatggctaatttcttaaggtggaaacaaattgaggtaatactggtgactaaatgaataaataaaaatacacatttccggccgggcgcggtggctcacgcctgtaatcccagcactttgggaggccgaggcgggcggatcacgaggtcaggagatcgagaccatcccggctaaaacggtgaaaccccgtctctactaaaaatacaaaaaattagccgggcgtagtggcgggcgcctgtagtcccagctacttgggaggctgaggcaggagaatggcgtgaacccgggaggcggagcttgcagtgagccgagatcccgccactgcactccagcctgggcgacagagcgagactccgtctcaaaaaaaaaaaaaaaaaaatacacatttcctagacaaaatgttttccatttagcccctaccccatccccaatccatatagcaccttgtgaaaattagcaaaagtgtccgttttgggaccaggcagcaaatggggaaaggacagccaagtgggaggacacaaatagtcatagggctcctggcttggtgagtagagcgtggcctagctttcagcactagtttgccccctcagatggtgcccttgtgcagtgagcaacagctacaaccataccaggtgactgatcttcctttcctccttccttccttttcgtcaattgcttattgaatacttcctctgtgtttcctgttccctgaccctccccttcacacctccccactgtgtaggtaaggaaaacctaaagataaataggacataaagaggcttatggtacaatgggggaggtggacatgtaaacagataaaccattaggatttctgatatctaagactgcacaatttatacatgtctaaaattagggaacctggctgattcatacgattcataccaggaataagagcctgggaacttacttccttaaagaccagtgcccagtgggggatgcttagaagtgtcactgtacaacatttgctgtccagaatcctgacttttcagaaagagacatggacaatattaacagggaagaggcctttgctcttcaagcaccttgatgggtttgcaacggcacctttgagaggaggctgtatttgtctgctttatttaaagggggaagtttgaagtagaggtggtgggggcactggagtaggaaaggagtaagaatggcaggatcctgcatggacaaaaggctggagaaaaatctccatggaggatgaatttgtaagttatatctgctatgagcagtgctgttaaaatatttactccgtaacactccccaccccccagatccactcattatctcgaactgcctggggtaaaaggaggagatcaaggaagaatctggatcctttaaaaatgtcatgggtcaaaaccgtaggagctagaggcaaagaaaaccatgagaatataaatccatgactattcacacaactactggggaagtctttggatatttttcaggccacggaattaaggattcaggggaatttcaggcagctcccaaggagtagggaggccccagatgctatctacattggagcaataatatccgtgaaattgttggtcatattttcaactcagggtcctggtcctgttcaaatgcttacagcagcaagggagataaaggagtaaagcaggctggatgtgagacagcagggagtggtaggcgctgcagcaagctgtagggtgcaagtcctatcggaaggagacaattgcctcccagctccagcggagtgttgccttgcaagaatgcaagcccagtgttgccagatagtccacattttaagagaagccagaaatgcaaatgtttcagaaaaacctcgtttttgaaaaatgttaactaattcagaaaatattttcaaacttcaagggtcaaacaaaagatgtctcgtgatgtatgtggtttctaatttagaagacagaacaaatacagggataagattcattttcaaaacaagtaaagaaatgaatggcatttaagtgagatatgataggaaaagctctgattcatgcatcttaaatccagggctttcggctctgcttgactactatttgtctgtatgtttacaatgaaataatttataatgtcgtggccttcatctctttatccataaaatgaaggcattaaatctgacactttttttagacttggagatgtgatgattgagggggcagaaagaaagtgtaagcagtggaaaaatgagccctgggtgtgtttcaaaatgtgttgaattcattgacatttattatgtgtctgcaaggtacattgccttgatcatggaattcttgcttactgtgaaaaagtaagcataaactcaaaaagcaccttaattattttgcctacctgagaacaatgctttcaaagaagtgggagaagagcctcccccaactggaagctgtgttactgacactatcagcaggtgagttacagagtctgtcagcaacgataagagcactggcgtatttcctattcagactgacgctgcactgagacaggaacctaactgatgtttgttcaataataccaagatatgtcacagaatctgtgggggtgtccggtatcttttgtcagcttagactcaaaccctggagaaaatatgttgcagactgttgcagatgttctgagattaaatgatgttttcctgaaaatgcatgaggcatggtctaccggtttgcctattggcaaaccgcctcttgctgccatcaagaccccaccccctcccccaggccattctgaaaaagcagagctgcctctaggcctttcagctttaccctgaacctcaagacactcccacattcttcagggatttggggatgggtgggtgggtcttatgatcccaaaaggatgggataggggagaagtggggtgggtgggaggatgagaggtagatgcaaaaagatgggtggggaagagaggacctaaacacagtgctgagatcgagtaattttaggaggcagtactgtttgtggaacatttcattctttatagctactgtcacattctagtcattagactgcatttacttgtgggttgtagaaattacttcccatgggaaactaaagcaattccttcttcaaaggatgctttgttttctaagagaagaaagtaaagcctatgacagtgcagccaactatgtaacctacattccctgctaagccactcttggttgaagttcactgtttagcatgaccacataaagaagtaaccaagaaatgatgatgatgacgatgataatgataataatagctagcatgtactgagcatcttctatatgccaagccctgaactgaacctttatttatgtgttttaatccctatagaaaccctggctattatcattagccccattttacagatgagaaaactgaggcttaaagaagctatatgtgctcacgataacacagctaggacttaaacctgatctgctctgctctgaagtccattcttacaggcactgacctctgaatgtaccacatttggctgagaagtcctttgtcatttctgacatagaatctctcctagcaaaaacttcaggaataaggagtgaatgaaacaggagtgcacaaaacagagagtggtatatctgaaactggagaagtccatgtgaatttcagttttaatcaattacatccattaggtgacagctgcttcccttctgccctccaggtgcctgcacctagagcttaaaacatctgcaaattaaagtgagactgtgctgctgtccgaggaaatgagagcagcagcttctgctctctgcggcctctgccagcccaaatcccattcttgccttgttagcatttatataagacctctggctgcagcaccaatctactgtacctccctgccctgcgtattctcattttgattagttacagtggagctgtaataactggcttcatttcttcccttcacacctgatagaataccaggagctccctgggccctttgtctggtatagcatcaagccaggatcaatctcacctgagcgatgattactaattaaatgcttccatccttctattccatgttccagttttcaaagagctttcaaacacattttcttgtttgcagtgacataatgagtcaatgggggcccggcgaaaagctccgtgtgtccccgcccctatcacacaaagaattcctcttttttctcttgagagcaggactctagaagggtttgggttttggctgtgatgctagaaggaggaggaagggaacccccaccacgcagctcttatagtattaaggagagagtttattgaagaatagaggcaagagccttggagcctctagaaatgcactttcctaaccttgggcgcctccactcaggtgtcctctgccttcaaggtagttggagatttaaattgataccttggagtagccggccacccaccctcatggagggcacagatcagcccccttctttctcttcccacactggatctccatcagtttgccagtagctcggagggatgcttttgcccttggtcaacagattctccctgggcttagcacatggggccctcccagcccttggatcccaactcagttcctatgttggacgcttttccatcctaaaagaagagaaatcttttcttatttaaaccacgcagtagagtgtgccacatcatttagccaagcacattaatgaacctttggagatgtcaagagaagccagagttgagtttgagaataggagttggagcagctgaagtgtgctgcaaaatgattctctgaaaaatgtttctatgctagtgagagctgagaagagggaggaggcatgaggcatgacttatagtaggaggcagatgcctgcgctgacagaaatgggcaaggtggttcagaaatgaaagtccaatatttaactttttgttgtttacagtgtggcaatgggaagcccttctgtttcccagtcagtgaaatctgacttattaacatatgtgcagtgagttgttttgtgcgaaaatgaagggaaaagagaagagattcacaaccggaagcagaggaggaggacagccccaggagtgggatgtaaggaggatagagtatgagtggagccagggtttccatgagaatggaaccccaaaggaattgcagaaggcttctgggcatgggattgaggagggtggatgtgagagagtgggctaatgatgacacctgggggatacttgttacagtcttgtgaggtaggcagagcaagtcttggtaaaaccccattgtacagatgagaaaaacgagactcatatacattacaatagttgcccaatgtcacgtagggcctggtaagtagggaagcccagaatagaatgcaaaactacgttcccttcctagccgaagagttcctagccatattggccagctaaaaagcatccaataaaagataactgaaggtaaatgagcacccagaggcaagcagagctgcctctaggcctttcagctttaccttttatatactttggtataactcattacatcatcagccttctcatcactgggtcactctgctataaacttccctattagcaagcaggagggaaggaaaggtgattttgttgcaaggaacattcccagagcagaaaaactaggtaggacatcacagcagcgcaatctgatgggtaagcaaaggttaggaaagtgaatgatctgactcaaccaggcccaagctatgcctgacaagattacgggtccttacaggtcctgtcctgcctgagtgttttttcctctgcagaaatcctgctaggatttttctactttgggaccatacttcatctgacaacctgcctagtaatgtaactttcatttctaccttgtgaccttctcctccattgactaattcctccgttctgtggatccgtgattagggatgtttgcttattctttccccaccaatactcatgtcctggtctggggttcctgtgggcccttgcttactgggtaattggtggttgattcatggatgttttcaccctgaaacttgtgattctcacatgactctgaacaagagccaagctgaacttgggccatgtatcatttccaggtggcctttttggctcatttcttgcagctgcatgctctggtaattgagcatgggacaaacctgatggcttctgtccttggagctgccctgatgactgctgtccccaaggcaatcccctaatgacttcattccctgaggctgtccctgattacttctgtccctggggttgctcccagaactctgcctgatgctgaggagtaagcagtcaggccatgaaatgacagaatggaaaagcagaaactctgagctggaagaggagtttgtggtagggtactcgtacatctctgtctaatatggcatcacttaagtctgttatcccagtgtaattattaagaacatatatttaatctcaaaacatcccagtgtggataataaattatatatgatcaccctactttagggatcgtctaggctagttttttttttcaagtttttgtttagccttgaagaccacttcttgaaagggatacttactcctgatctctaatgtgtaaaacaaaaaaagggagagttgtccaggctgaagggggcagagaaggctgaacctcccctctaccctaccctgacttgctgtggcagccctccctgccagccaatggaggtcttggagctcaatgcatccctggtgataccggctactttaatcttacacatgagggaactgaggtccacggagaggttaagggactatgtatggccacattactagttagtggaagagcccaagctagaactcagatatgcagactccactgtgatcttgccaccatgccaagtctccttccagcttgcctaatggtcttaaaactaagtggtgaaatgtccgctattgtgctagtgcgcactctctctctttcgctctctgtgcgtgtgtgtgtgtctgtgtgtatgcatataaattttaaatgatgtattctttatacaatttatgtaaaattttcatactgataaaaatagtcatgattttaaaattacccagttcacccttgagaagtcaaagtccataaagcaacaataggggaatagcgttgtgttgagataacttgctgtgaattgtacacgtatgattaaagtaaacagtgcttagggacaaacaccttttctagagcctatatccttgaaaatatttggatgaacttcattaatcctgtctagcagctctcaaagtcaaacaggaagcaaaccccaggctgtagtataaaataaacactgtcccccccaggacctcccgagtggacagagtcctccctttgtcttagctcttcttccgaagcaacagttggcaaatctaaactgaaaccgagttctatcttgaaagcacacagcttctccaagcccctggttgtttaaatagttgtccacctttccttctgccttctgcttccacctgccctcagctgggactcagccaggcagtgtcaacttgaaccctgggcaggaaaagcagataccaaatgcaaatcagacagcaatgcaaccattttttatggcccaggaaaggccaacaggaggcaaggtcacgtagaaggcagcctgctggtggcagcttcctgctgagggcagggttttgctattttattttaaccttgtttcagtttgatccaagcactgtgtctcaaggaaacaagcacctgtaactgtggcccacacaaaccaattttccccaatcagaaagcaatcatttccgtctcctggtgttgaaaaaaaaccgccagatacaggcagggcagggtatgggcttgcccttgtccttcttacctgctgactcagaggatttgcatagctgggcttctgaggaaacacccaaatccatcagtgcaagagtttggggtatttatgcaaagcatatgtcccctgttctgaggcagagactcaagggtttgatagaaacaatagagtagaaatgaaatctaacatttgtgaagccctttctctgggttcagttatccaattcaagcctcacaaaaacctcatcaggtggaaactatgattatccccatttcagagatgagcaaacagggcttgataaagactaaatgacttcagccactcagcaaggcagtggtggagtgagggaagttcagactgagagcctgcccctgaaaacaaccaaacccagtcatactgagaaacatccaggctagtcttcccaaacttcagggctcattcagatcacgtggggctttcgtcaaaatgcatgttctcattcaggagctccagggctgtgccagaaaccctgcaattctaagcagctcccaaataatgtcaatgctgctactggtccgtgaaggatctagggaagaaatcagcagactttttttctggaaagggtgagatagtaaatattttaagctttgagggccacatccagcctctgttacatgttctttctccctttcttccttctcttcccttcttttcctttcattctccatcatttggaatgtaaaaccacccttagctgttggctcgtgggtgcatttggccagagcagtgatttgctcttccttgccctgggacagtgtagatagagaagttgccatgccaatgggctcaggtgggtaccctttcccaacagcagctatgagattcagtcctactgttttcaattaggtatgcttttctcaggacagtaagatgccatataggctgtctccccagtgaccagtctgagttacaggtaagaggggggctgacttaccccagaaagtatgcattggggtagtgaggggtctgggttccaagttgtgcaagaaagcactggaggaggactgggacagccgagggaagggggagcctgctatgcacacagtgaacactttacctattggggcggtaggttgttgaggggctcctgtgacaggtgggaggtcaaactcaaaaacccgttcaactccaagagttcaagatcctgtgatccttgcatgcaaggctaatctaatgttgtcctgagataacgtgcacatgcgtgatctgattctcctcaagctgatcagcaaccgcatctcagcagctgcctctttatctcttgccctgcctaggaaggggaggctgaaattcactccaggatgtcactgctctgggggaaaaggaaaataactcccaccgcccggctcagaagtaggaagtgagggccttccgctaaaggcaagggtcttatctaactactgggtaaccttgttgtttttccatcttctcataacttgagaatgaagtgaagtcatcttactttcaggaatccgtctaaagaaataagtatggatatgaataaaattgtttgtcctctttcaggtgcaaagagtctactctgcctactctgtcattcaaagcttggttgagaactggctaaataagtgagatcacttctatacaaatagaataccatgcacagattataaaatgattctatgtatgaaaccatgtgtatacatgtatataattagcaaacacccaaacagtggctctttatgggcaataggattatgatcataactgtggaataaagaagagacccagagaacaagagtgagtgcccactgggaagtgttctaaactgccaagttctacaacgacgtaccatcctcagtggtaaggtaagttggcagcagggaactatagatcagagcttctcaaacttaaaggtgcatattcatcctggggatctggttaaattgtaggcttagatgtagggggtgcagagggccctgagattttgcatttctaacaagctccctggggtggccaatgctgctacgctgctggcccaggaccttatttcatgaagcaaggctctgtctacctcgcaggagaaggcgctaagaagaggagtcaccagtcttgatatgttactcagacacggtggtgagtttagtttacatgtgtgtgtatgttgtcctgagattgttgtttttggagggggatataggagtcactggtcttgatatgttactcagacgaggtggtgagtttagtttacatgtgtgtgtctgttgtcctgagattgtttgttttggagggggacagaacatggagtatgtatagaaatgaaatcacctttatcaataataaatatggcctagtagagattctcctgcctttttctttttctcctccctgtagttcaatttagtcgcccaatttcctctcagaagtaggtcctgaggttgaaataggaaggaggataagggctgtctggccccaggcacacagctggccccatggacagggatcacctgggtaaggtgaagagcacctgtgagccccctcagggacacaccctcagacgtcaagtttgacccataccagcttttatcagccctgaatcctctgtcctgctgccactttccggccctgacagcctgttgcgcaagcaggattctctctcccttaccaaactgcttggaatagcaggcacaagcagattcttctcaacggcccagtgagttttcatcggcatgatggacaaaggggacccacacaataagaatttacaacagattgtctgctcacagtgtagactccaaaatatttccatgtgttcttccttgtaagaatttagagcctgatcatgtgcataaataaaaccccggtattgttagtatttagccaacatttatttcacattttatatgtgtcaggtacccggctaggtgctttcacgtttgtcatatgactttagccctaaaacaactctagaggcaagatattccaatgaaaatatcaaggttcaggttcagagaggttaagtaacttgtgaaaggtagcacagcttataaacaataagcccccaatgaaagaaaggaagaaaaggaggtgacaagtacattgcagggatatgttggcaagtttgttctgagtggagttcttggtggagagtgaggaaaatgccctgagaggtaatgtggtcctgcacacctacctagaatagacctcaaatattgcttcctaggctatggaagaagagtcatagccacttctttcttgctaatagaactccagttttgtccaagtggcaacgtgtctagccccaggcaaagagcaatagttgatctaagccgatcacggtcatctccttcccctttgccagtgattgatttacttgtgggcatctgatctggcgtgagatgaaaaaaaagatccatgggtgcttctgggaaagcctttctccctgataagaaagaggtccataaagagagggtcctttcccgtaaccaaccctcctttcttcctgcttaggctgatatataataatatgaaactgtgatactttatacttagacaaccgtcttgtgaccatgaggagaaatgtagctttacactgaagatggcagaactaaacacagaaagccaggatccttgctgaatttgttaaaaaaccaaatggagttgggcacagtggctcatgcctgtaatcccagtactttgggaggctgaagcaggtggattgcttgtgcccagaagtttgagagtggcctaggcaacatggtgaagccccatctctaccaaaaaaaaaaaaaaaattagctggatgtggtggtatgtacctgtggtcccagctactcgggaggctgaagtgggaggatcacttgagcccaggaggccaagattgcagtaagccatgaccataccactgcactccagactgggtggcagagggagacctggtctcaaaaaaacaaacccaaaaaatcatctgggaccatgggacatctgcctctagacttctccaaatgtgggataatgtagtatcttggtaatgtggcctactgtacatcaactattctgttgcctgaaggcaaaagcactgcacacatacaagaggctccccttggtgagagactaagcattcccacacaaatgtctctgtcccaaaccgatgacttgtctagaattgctttccatctggttctcaagatcttctccttacggctccctttgtccacaattagctcagtctagcatggctacaaatcagggaagagtcttcattattctacaagagacagtttgtttattcttctacattaccttcatcttcgcaaaactcagctcacctcctcatggtagcctgcctccttcattaggacttagctgtggtaggcaaaataacaggacccctaaagatgtccatatcctgatccctagaacctgtgaagatgttaccttatgtggtaaaagagactgtgcagatgtaattgaggttaatgactctgagatggggagattatgttgggttttctgggtgggtgcactcacttcacatgagttcttaaaagtggagaacccttctgtactgtgatcagagagagatgtggctatagaaggagatcagagagatgtgactttgctggctttgaaggtggaatatgggcagcctctggaagtggaaaaaggcagagaaaacagattatcccctaaagcctccagaaagaaacacaaccacgccaacatcttggttttagcccagagagacctgtgttggatttctgacatacagaaatctgatttccgataactataaaatatttgcagtgtttaaggcactaggtttgtggtaacttgctgtaacggcaatagggaactaacatattggccataaagtgcctggcaccacattttccactatggtatgtagtatactaggtgaggatatgggtggatccagaaagatatgtgtgcaaatcctggctctgtttccatgcgaccttgggcaaaccacttcaattctctgggtctcagttatatcatccagaaagcagagatgaataagaacgtttctctcttacaggtttgttgtgatattagaatgaggctgttcaagtaacacagttagcatgtggctggcaaataactgtcactagaaaaatggtagctgttacaatatttattggaagagagggattgagggccttgtacattcctctgcggtgaggaatacatttaagaggcatgcttcacattcagtttggagttgagagaccatgtgatgtaatgggaaatattgtagactgcaaagtaagactccctggatttgaatccagagagctgtgtgaccttgccacatgcatcagcattttagggtctctttcgccagaagcagacccgaaataaccatttgagggcgggtagatctttctgaggtgatttcaggaaatatgcatagggaatggaaaagtcagatggaaagggaagtggccaagaagcgtatgtttctaagcaagttaccagcgtggaagctggagtgtaagccctccagggaaactggggacacaggtagaatcatgcctctgaattatcacactcaaggggtgagggagctggggccattgtatgccaactcccatctgtcattggttgagggtcacttccaggggacagtaattccccagcaggtcctgcctgccacacaagggcagagaaagctctcaggcaaagctatggtggcagcgggaagttgggccagcgtgtgctgaagtggtgagggctgaagggatacggagaggagccctcagtattgctattttaaagatgagaaaatttagtttcacatggtcccatattttctcaaaatgggataatgatagtatctgcttcgtagaattatcaggagagttgtgtaagtgaacaacgccaagggcttccatcagagcttgtcatagggcaagtaagcaccatttaagtgctagttgtcatcatctgaagatttttgctgttctgtgatgtaaattttgttcccaccacccccctccacaatgtttagttaagctgttcaaactcgcaaatacattggggcgatgggggcttgtggagctaaaggtaggggctaacattaaccactggtccaaccacacaaattctcaatgatgggcttgcacaacatctggaggcctgcggacttttgggggcatggatttgggaattggaaccctgctcttacctctctctcaaacggcatgaggccacagatgctatctgggttgtacattaaatggcaagcctctgaaggtagaaacggtgccctcctggctggattgactcggcttcttccctggcacattgtagacactcggtgattggctattgagtagataagcatgaaaacagcttagaaagccagaaaaggaatgtttctgcctaaaatcacgggtgattgatatcatccttacgtgcagccctcacctcacaacctcttgtttccctggccacttggccaccaggacgcaggaagtaacctgcacctgaccccctgatgttggcaatgggacgagctttccactctcggcagcatcttgtagaatacaaaggactcgctgtagtatttataccaacacacacattttaaataggccctcacttcttcctgaaaggaatccaaagactctgttggaactgaaaacattcatatttatgtatcaccagttattgagggaacacaaagtgctcagcaaatatgatctcattagtgctcacgacagccctgagggaagaagttggcaagaattcccaccctccttggagaggtgagagtatggaggcccagaaggccagggaacacacgccagagccactcagcaggtgctccagggagctggggcaatggcaaggaaatgggaggctcaagagaagtgtcacaatgctgtggcctccacaatcactgcagtgtccagaggacaagcagaaatctggaaatatcccccatgtctgtcatgatgcgatctgatagatgcctgatggtactaacaatgaaatgccattcaggtgttcaaacagatccatgttctgtggagaaagacattctaaggcatttagataaaaaatgcaagtttgcaagagtatatataatatagtcactcattactattaagtaaatgtataatatgaaggggaaaatctaaaagagtgtataccaaattatatatgaaatatatatgtctttgtgtgtaagtattttcagagaaaaggcctagaagaatgggtaccaaattatactgaaatatacatttatttatttttattttcaaggaaagttctagaagaatgtgtaacgatgattatctcaatagttggattaaatatacttttcttagtcacacatttgttaatttccaatgtgcatttttttggtaatcggattaaaactttctaaaaaccagaaaaaaggaaattcattgtcacctagaaagtattaaaaatagaaaataaaactattaaaatatgctcagagtgtttttctttcattaaaagagaacactaggagtgttttccttgatgtgaagaatttggagaaattccaccagactttctatttagttcctactacagagtgaaatttggatcagatattctattttgtaaacgtatggtcctgtgtctgcaaaacccaaatgtagaatgaaatctttctgcttttttccttgatgtttttaaacatgagctagagctgactatttagcatttttacctgaaaaactttagtagaaggaaaaccaaccccacgctgacaagggatttaaaatgtcaactactcaacattttcatgagttactgagcaatagatgtaaattttgttatatattaaatttcaaaaagtcagaccactgtgctttacaatgtgaatgtactttatactattgaactgtacacataaaaatggttaagatggtaaattttatgttgtgtgttttttaccacaataaaaattgccaaaaaccaaaaaaaccaaagcaaccctaaacttagatcctttaaatctaaggtagagtacagtgtaggaaaagaaagggtgggatccagaagagctggattcaggtttcaagtgtggttcttacagcaccgggccttggacaggttgcattcacttttctgttcctctcacctttctgagtagctatcacttgccaggcatagcagaaggcactgagatacagtggcccatgaaatgggtgtgtccctgccctggtggagtgacctcacttctcttaaccacaagtgccccccagaaaataggaaataaggctgggctcagtggctcatgtttataatcccagcactttgggaagctagaagaaagaggattacttgaggccaggagttcaaggccagcctggccaacatagtgagcccctgtctctgttttataaaaaataaagtaaatttttttccaaaaattaaaagcattttttaaaaaagaaaatggaaactaataatacttatgctgcccatgcttcatgagagggaaaggatttgctaccaaggctacagcttgactgtaggtatcaaaaaaaaaataaaaaatctcagcttcatcccctaggagacagacaaatggatcaaaatctgaattcagacccactttccggtcaggagcagggtctgtcagcagcattctgtaccttcagcttctcatgccctcttatcaatggggctggacaaatgaagggcacatttgtgacctgtggtgaattcacagaggcgggacattggatagttaccataggaatgcagcaggtgtgagggagctgcccagtggcaggcacagtggtgaatgtttattgtctgccctttgaggcagtagtgataacattgatgatggtgatgttggctgtgccaggcactgttctcagtgctttgcatttacttacttaatgctcatgatgaccctgtgatagaactacttttattattctgttattacaaatgaggagactgaggggcagagagaattcgctagctagaaagcggcagagttgaggttcaaacacaggcaattcaaatgtagaccctggctgggcatggtggctcccacctgtaattctagcactttgggaggctgaggcaggcagatcgcttgagcccaggcaaaaaccctgtctctacaaaaaatacaaaaattagccaagcctggtggtgcacacctgtggtcccagctactcaggaggctgaggtgggaggatcacctgagcctggagaggtccaggctgcagtgagccatgattgcaccactgtactccagcctgggtgacagagtgagaccctgtccctattattcttcacattttatggataaggaaacagaaactcagagagggacttgcctagggttccatggagagagctaggtttggcttttttgggactccaaagcctgtaaaacatgacactctcctgtaatgccccaggcagtgaaaatctccaggacaatgaggtacaccctcaggctggtagctgatgggcagagccactgtcaccagccccattctgcgtcctgtctccccaggctaaaaacaggacctggggaggggtaatgcttgcttggctttctgcccatggcagatgggaccgcttcaccaccatctgtgagtggcctcattcctagtccctgagccttaatacttctctggatattcattcattcattcaacaaatacttattgaactctttgccaggccctgttctaggtgctggggattaaatagtgagccaaatagtcaacaatgattttgtgcttgggttccagggtttaagctcttgccttcttccttcttaccccatccttctctgtatctcatttctttctagaaatagagtccctttttgacctttaagtattgacatggtgcatctgcagggctctgctagcctaaatggtgtgtatgtgcaaacgaaagtgccccctcagagtgcacgcagcctcacaggcccccagcttggagagtagatagtgggctggatttcagcccccatgcaccctccaacctaggtgtctttggataggacagagtctatgttatggcatgtagcaggcccctctctgagcccttccagagattagagatgtgctcttgacacccaagcccagtgtcttcaaatcccacctgtttccatgtcccacctgcttagccaggtcccccattcacttcaatccccataagctgggccctgcagacctccagctctttatccattgtccactgctaggctggtcagacataccttgtccacctctctggacccctttcctcttctcctcctcttgtctgccagctgctgggacatctctctcccactttgtagctctgccccacccccaggccagggttcagccatccctgcatgtgcttttcatgttcacatccaggagccattgtgacaattgggccatttttagggtgccccaaacactcaccttggttcacagaaaggcattgaagttctgctcaagagctggaaggtataaaacacacaactgtcagatgtcctccttcctgattccattctgacatgagatggagatgccatgtcatgactaggaggttatttagaagtagcactcaaaatatagaacagatattatataatttttcacagagaaagttgtggtttcaaaaaatcaaatacttcctatttcattcacgattggataattcacctgctcaaaccctacatgtcctcagaccacatcttccaggaagctttctcagattgcctcccgtctaccttccctgcctgacagccagagaaggattaggtatcctcctctgtgatcctccaagagcacccagacttgtccaccatgacactcgtcacattgaattgtaattgcctgtttgcttctatactgccccaagtagactgtaagttctgtgagaatctgtactagacctagttcacctttatatcctcttcacctgatatagaacctagcacctagcaggaactcagtaactgtttgtgaaataaatcaaaggtatttgtatggggaaaaaaattggcatcaatgccaagctggagttttccccaacaatggacatcctgttctctgctgggaggagtgagggaaatgagaaagtgtggctgctctcagatcccccagacaaacatccataaataaatcagaaattactacaccatatagcaattccatccatccatccatccatccattcattcattcatttgtagtagccatttattgaacatgtctatgtgtctcatcactggagattctgcagtgaaaaaggtagtcaaagaccttgccttcttggagtttatcttctagtgagagtgaaagggcagacacacaacaataccttccctagttggtaatttatatgaccatgaaacgtcatagcttgattggagttcattggccccagctacttcgcagaatagtataatgattaacttgtcaagcagtggagtcagacaggttggaagtaagttcctaagctatgacttactagttaatttacatttgggcaagcaacttgacctctccaagtctccattccctcaagtggtgataataacaacagcacctacttccctgtacctatatgcctggctgagaggaaggacagtaaaggtgagcaataactattcctcaccacttaggtggtttgggaagggattcaatgctctctgggcatcaatacatatgcactttactaacattaaggcattgttttgattttttactttcactgatttgttgcagggtataactggcttaatttagtcctctaggtcgtgcagtatttgcatgtgatctttgagctcagcctcagttcccagagcccctgcagcaggtagagccactgtccacaaacttcaagcaggaacacagagcaggcagcggtggggactacagcatccaaggattctgcttgggttctggccattgactctaccatggaagtcctggagctaatttccccttattattgaacttgaaacagctaggataaataaagcagatttttatcaactacattataaacaaaaggcacagatggcggggaagattgactgacaacagcgaagtcctcggggtgctcttgaactccccttggtgggggaggtgctaaagacagggccccctgctttgttttgttctttccatttatgaattccaggaactcctttccttgaagtctatagcttccatcaacaggatattagttggtgaattctatttgaagccacagaggaaaaaactttcaattaggatctgaataggtcaagggggtgattggctgtccagaggatatgcagcaggaagagaaaccagagttcaaatgaagggtggagggggggaatacaagggtcctcgttgagtctggaatgatggaataacagtggcaaaaataagaaagaatgatgaggcaagtttaataaagattttaccaagagatcctagattcactttataattatgccttctctttattattctcttctgcaaagcacacacaaacacacatacttcatacggacacacatacttcatacggacacacatacttcatacggacacacatacttcatatggacacacatactttaaagcacacacaaacacacctgcctcatgactaaaatctaaatcaactttcacatatttcatatttaaccatgatccagtgttatcctaaagccatggccactgttgtttgttccagagggggtcacctgacccaaacaaagccaatcatatttctaaatcctgaccctaaacttcaaccataatggaatgatccaaggtgaaccaatcagagtttttgtccaggagtttacaagtagaactaggagagtgagtcgtgtgcctgctgcaaggccagagtgtttgagggcataaaccaaacttttaaattaggaaggctgaagagaggtggtccttagtagaaatgagttctaagatgaaaagaactgaattgaatgctgagaatgggataaattggatccttggggctatctaaaaatgggtggatcaataaaatcaaattttccaaagggcttgttttctgtttaactcgtgtgtgtaagagaaaggatggtacaccgcagagcagtggttcccaaattgtggccctgggacatgggtggtggtggggagaggtaccaaacaatttctggggatctgcagaggcagagctatttatataataatcctaaggtttgcctttttcagtctcattgtcttatgagcataaagtggagttttccagagactatacaacacacagtgttgaacagactgaatgaagaagcaaatatgagaatcctgaccagcttctatcaagccatgcatgaaagagatttgcaaagaatgtaaagcaatgtgactcttctagttccattattttagtttttgaaaatagcaatttttacgaaatttgtattaatataaacaaacactatgtttattgttgttattcctaaataataaatacgttttttcactttgaatttctaaagtagcaaatgctcatagacacacacacatcaacacaagctgtcttgtgtcccgttatttttcagagtgtgaaggatcctgagaccataaactttgagaaccgctacatcacagggtttgaaaagtgtgacaacattttcttccagtgttagaaacaacgtggaatacacctaaattctttaaaagggaagcagcagctatggggaaaagggtttatatctgaagctatgatacaagcccaggtcccatcaccttcatgcaagtaaaagattgggcgttggaccacagaagatggtcttacggaaagcctggtttactgtagttgctgtggagttggagatgacgctgcatcagaaggctgcctaatggtctccttctgcctggccatgtcctttcatgcatggggaaagatgccctgctgagtgcagaaactgagggggagtctgtctcctccaggccctgggggatgccttccctgggagagacaaatttcaggctccagaaaactgaccagtaacctaacggcattggccatcatccgaaatcagacccacttggtgttaaagaaataagagctcaggtgtgccttgcctgtttgcaggggagctctgccacctgtggagacatgcaacaagttgactccctgggtcatgcagaaaccatgtgcctaatgctacagggacaggttgagctcacaatgaatttcccaggcgcgagtctggtgctggctaggtggctctgtcctttgcacacagagacgtgatcccagtctagctaggggcctctgcttctagcttagtgggtcagaggctcctaagcttctttggtcctttgccagtgggtcttgcccctgacccttccaaaggaagcctctgttagaaaaataaaacaagtgtctaatcgaaatctcagaatacccctcaagagacaataagagggatcaacaacctgggattttcatttcacttaatggtaacaaacgaatcactttaatgatccagaaaaacaaaatgaaggtgttttttaggcattgtgcatcttcgcttatggattagccaatcaggaaataatcagagggagctgggagatggattcagggcaggtcatttttgttagtgaagtaatttgttgctgtatttatattccatgttctcaaaagaatttgttagattgtaaaaatatacaacaaaataattaaaactgaggaagtcaacctgaaccctcagatttactgaaaataaagaacaaaggataacttgggagtttccaatggaggaagacatttagctccaacaacaattactaacatctctgtggaactatgaacttgaatcaggaaactggttaaaatggaaaggagagctaatttccagtacatgaacatatgtacacatgtgactgtctagatttctgttgaagtcttaatagtatattctggtaaaaaagaaaaaaaagaaagaaagaaagaaaagaaaaatacccccaaatactttcacccttaattttcaattaaaataatatatctcaaataaataaataggccatcaggcctagggattaatactgttagaaaataagaaaaaatttggagtaaagtcagtatgcaaaccatttgtagatggaaagccatatatttcaccttgatctttctagcatccagcacaaggaaaataacatgataaggcaaatatttcctgaggttcattagataaaatcagaccattggtcactccttggtgtcatacaggcaagcctcaaggcaaggaggcaaataggttcagctgtttaatttgacttttcttcctgaattgattggaagtcctttgttcctgactacacagaggtgactttaacaacttagtaaacttagtaacatataaaaataaacatctagccgactaatgatcatcgaatttggttatatggtttttccccttctttctccctggtaatattgtaactttatttatttgtttatttattcatttgagacagaatctcttcctgttgctcaggctggagtgcagtggcacacagttcactgcagcctcgaactcctaggctcaagtgatcctcctgcctcagcctccaaagcagctgagactatgggtgcgcactaccacgcctggctaattttttatttattttttcttattggctgtagagatagggccacattatgttccccatactggtctcaaacacctgtgttcaagcgatcttcctgccttacctcccaaagtggcgcccagccctaatcctgacatttaaatagaatctggcaaataggaaaagcctgtgggaaagggggcagaaaaactgattcaaatagcaggtgttattagaactactgagaactttagaaccagggagctttgagttatagttctggctgtggcttattggccaggccatgctgggcaaactattgaacactgctgagcctttgcttggtcatctgtaaaatgatcactgtaatagtatttacctcataaggctgctaagaggattaaataaaataatgcatgtaaaatatttaggagagtgccttgtctataataagcactcaagaaataccagattatgatacaaagaactctcactatacagaatcattaaatcctgatcacaattctgtcaattaagaggacatttattattacctttttctgtggactgaaaaagagacataatttgcctaacacacgcaaaaccgtctggtaaagagaagggttacctataatatataatctaaatatacatatataataacatataatctaaaggaatgagctactctgaaggtcctgcaattctaccattagagattaatttctttgtactaatctttcttttaaaatatgaataataactcaagagtgatagcatattaggagtgtatggttttattggaggaaggtgcttatcacagtccataatacataaccagaatgtagtaaccttattttgcttcattgtatttatttttacaatgaacttctattaatgacaaaggatactggttgctcatttacaatggtaatatgtagttaaaaaaataaatgtatttgagatttagagttggttgacataaataagaacataagtttaaaaaattcagttggcaaataaataatgcaatgtctgaatacctgcagtttgaaaactgcagttctatggggtgaaacatactcttggtcttgtctcatgaggcgttctttgctgtggcatctgcttaagtttttagtgtctttcttcagcatttcctgtactctagtcacataggaatacttgctgtttcctcttttggggcttttgttgtctctataaaagctggtttcactaattggaatgctctttcttttctcacctctttgacaaataaatttctgcaagtccactctgcaaagcctttccagacaccatggcaacagccaccctcagcctttctcaccacatcaagcagggtggatccctggtctatgggcctgtagcaccttgcgctgctccctcggagaacatccccaccagaggatgacttcttctgggtactctgctctgagtgtgctgataaagaatgtatagtctcatttggcaactgcacagttttataaatatttatatcatcacacttgtaattatgttgttcaagtcttctgtatcttttccaatttgtgtaccagtgtaatctactagtgcataaaaatctacaactattattatgaatttgtaaatttctccttataatttgacttgttttaatgttggtgtttccacacatattgtttggtgcctacaagttcacaattgtagcatctttttggttggttacaaccatgtccaggtcatctgtgtatccaatagttagctagatgtggagtcaagggcagaatttgataagagttagcgctttacaagagattcagagggccttgtgttcatagaaggaagagagcatttctgctggcagcaggactctgtcacctttaaatgttataggccagagcccattcagctttccaagggcccatggcaaggaggaacctgtaaagaaaaaaagtattggccccccaatacataaggaaaaactgtaaaaccaaaattaataaaaatatattaactgtcttcaataatagctaaatttaacatttatcaaattttactatatttgaaaataatctatcatatagaatagattttctggcagggtgtggtggctcacacctataataccagcactttggaaaacagaggcaggcggatcacctgcggtcaggagctcgagatcagcctggctaacatggtgaaaccccatctctattaaatataaaaaattagctgggcatggtggcgcatgcctgtaatcccagctactggagaagctgaggcaggagaatcgcttgaaccaaggaggtggagagtgcagtgagccgggatcgtgacactgcactccagcctaggcaacagagtgagactccatctaaaaaaaaaaagaatagattttcttacccaaattcccaaggataaacaaaataattcgccaaaaattatagccagctgtaaactaaattttagtttgctaataatatataatttgatgagcaaagttatatttaaagtttttacagcagaaatgtcatacttaacgtgcatcttaatatctctgatgtgaaggaaggtgaaaaagtacatgagactatgagcatcttaaaatgtcccagattaaagggatcttagggacagattgaaggaaatggcatttgagctgggccctaaaaaaatgagtaaatctttgaccaaagcaattggagaggaagaggacattttgcacagcgataagagcaacagtgcagaggctgaaatgcacacggaggttcagaggacgaagagcaatttgcttgggaagagggaatgggagctgaaaccctccaacactgaaaggccttgaatgcctcggctgaaggttggactattacattctggaatatgaggaacaaagaacagctgcacgatctgaaaatgcctccctgggtcacctatcactagaaacatgctcacaggtttctctttcctaaatcagtttattttcatttcagcctgggccatctggcttccaaggcatacagtatgagaaatcaagaggccaagaggccagaataagcaactgtcccctctcacccctccacgtctaaccattaacacacagttaatcccctgactttcgcaaagcctggacctcctgcctctttaacctctcggcaattaaatccctgccagttaaaaggccagagaggacaggtgtgtttcacacttggtttcactttcctgcaaggtgccagacgggcagccccaaaaaccacagacgtctttgttcatttaacagcatcagtttctagccagacagtctctcagcctgctggtagcctcaggtgtgaccaggaagaacagggggcttcattgctcctgctaattcctctactccaaggcttgacatattgagacaagctcctcctgggaaggcagcatctgagggcactgctttgctctgggaatccatccattcattcattcagtcaaaaccattccttgagcctggaaaagccagctagtctgctactacatgggagattcagtgtagatgagaaatggcccttgactcttcagagattacaggctagtagaggggatgcttacagagttttatataatgtaggaagcatagcaagaaagacatttatttgcagcttatttatatactaattgatatatagagttaaaaacttatatagtgcttattaaatagcactataagagtgtcaggtactgtttcaaaccctgaacaaatatttagtcatttaatccttatgaaaaccctagctaggtattgccatatccctattttacaaatgtggaaacagaggtattaaaagctaaggtataataactgtccaagttcacccaactagtaaatcaaggaaccaggatttgaagctggacagttccactctcaagtccataatcttgatcagtcttctatgccacagagaatactttgctgtttgacccagaaaagggatttcaaaagtggaaatgtcatgccagttgataataacaacagcaagaatggcaactatcgtctactgagcacttactctatgccacgttttgtgctaagaaatttacacaggttatgtcattttattctcatgataattctttgatgaactattgtgatcaatccatttttacagatcaggagagtgaggtttgtaacagagctactaggtgaaagatcaggcaatctgactccaaaattgaaagtcttcactggcatacaggcctgtgagacacatttgaaggcagaagctgcttggtgccccttaaacgtcacagtataggaagggtatgtctctattctcctgacgtccagccagtcaatgaattcaagctccagatctccccccggttaattccctgaagtgaaagtacacacaggttccaaggatttctggagcttgactggaaagggttcatggccatgaatgctgtggggcccagacttcaggtagcccccagtgtcccttagcccaacctcaaatggtcatcattcaccagaagtaaaccgagggtccaaatcatggctgtcttggcagcaggggtgagtggtgctgcagagtggagccttcctggcctggaccaaggtgcagctgcatctcagggaggggaagcctttctgtagttgtctgccttggaaggggcaacgttttctaatccatacaaacactctgtgtgtgtcagccacttggctgggcacaggcatacctttgactagaagatcaggatatgacctaaagctgctctagagagttgagataataaatcatgtttcctgacaacttctctggcctcatttgacctccttcaccaggacagtgaattccagcttcattaccgagcttgggtttcatgattcatctggcagaagagcaatgtcccaaacacaggagaatggctaagccctgaaaaaggagacttcatcaggagtgaccctcggcagatacctgaggcagcagaacccacaggaaggaagaaagaaagtcctccaaaccaggtgggaaagactactgcctggcagatgtaaacggaacaaagttgtagggcctgccaatcgagtcttcctaagagactttgtggttgtgagccaagcacccctgactgctgccgcaccaaaagaaagattgtaaaaacagcaaagtatagtagagtaataacaattctcaaccctctcagacccaaagtttgtttttaatacaaatattacataactcctttactgtcttgaaatgaaatacatggctaatataaccaccctcaaatataattttcagaaaatcaatgtagtagcctaactgtaatatcaggttggtacaaaagtaattgcagttcttgccattacttttgcaccaacctaatataatagaaataaataaaagaaaaggagtttataataaagtaatatgtgtttctgtccacagacacttaggcacgaccacgcagagactccatgaaagacccacatgcttaagtctttatgcagaatctatgggaacacacatgcacaaacgcagatgagcgcagctgagtcgcattggcagctcaaataccatgaggagcatagccatcgatgacctaatttgccaaaataatgaacaactcttgttaagattgccacatgatcaaagcacaatcatcccttgctttccatggatgttaccttctcagagcaattaacatatagtaaaatgatgcaaaaagtgctctgtgtttacaagtacaaccaaggtactcagttactctctggattcataagtagaaaaagatttttcacctccttgcatgtctagtgtgatttgtgggatgttctactcatcgatagtagtgcttcctctatcattaaatacgaaagacatcccacacctgaatgcttcccggagctggaattacccttgtagcaaaacaatagtgtagggtttactgttgtaaccaaataaaacttacaagagctctatctgcatatattcattaattcactcaacaaacatttaaaaaatacttatgttgagcaaggaagttattcatttatttaacaaatatttattggatatatgctaagagctaggagttatgtcaagatgtgtaagacttggtcctttctctcaaaggccttatgttctaatattcaagataagttccaaatataaaaataacattaagacaataaattactataagaaatagaaagtgacaaaaagcataagataggccgggaatgcctgtaatcccagcactttgggaggccgaggcaggcagatcacctgatgtcagcagtttgagaccagcctgactaacatggtgaaaccccatctctactaaatacaaaaaaataatctggacgtggtggcacatgcctgtaatcccaactacttgggaggctgaggcaggacaatcacttgaactggggaggcagaggttgcagtgagctgaaatggcaccattgcactctaccctgggcaacaagagcaaaaccccgtgtccaaaaaaaaaaaaaaaaaaaaagcataagatgaatagacaaaaaatgtttgatttgtattcgtgattgtactacatggagaacagtggagatcctagtttacagtggtcgggattcccaactctcccaccatgtcacaaggtccaggatttctagtactttattacatacacaacacccacacaatgcacacatgtgcatttactcagacatcttttacactctgcagggcttccgcagcctctgcctggaagaaggtaaaaaacctttgggctgcagaggtgagacctagctgcccctagaggggacagaaaagcagagacaccactagaagatgactaaggaaggaagaaaatgttttggccccctcccttgcactttgggagattcaggacagaaggatggtaaggaaggagtgtggattaacagcagaagaaaagagggttccactcccctaagaagcctgtccaggttcctctccgctcttttatttttgtcacacaatattcagaacaatatcttaatattttgttacgcttcttttttatgtgtctgtctcctcttaccaaattacggggcatttggggtagaggctctgttttttcattatttttgtccccaaatctggttgagaacctggaagaagcacaagaggtatgcactctacagatttttgttgaattggatacaaggaaggaagggaaatagggagggaggaaggaagccggatcaaagacttttctctgtagccctctgtctcagggtccccaggtcttctgagaaaaagagagttaccctcaggaacagttagactaatgagctcagagttgagaagaaaggaaaggatgataggtaggcagatagatgatagatagatagatagtagatagatagatagatagatagatagatagatagatagatagttgtagatagatagaggtgatagcccatttacttgctattatttgagattctttgaacagtgagcaaagcctttcgttttgccattagaagtaaaaaagattaacatgcaaattcctgagagaaacacacattgacaagatagagtttggggcaaagtatacatgataatagtggattctttcccattttggaagggaaacgaggtagaaggttataagacagcccatttggtggaagagggtgtttctgaagagggaaacattctcaaagaggagacccaggtccccagagtcacactgtggcagttgcaccctcatctgtgcacacaggtgctggccgccagcaggacagctgtgcagtgccactggaacagcctccgcaggcctctgctcccagcagataatagactggtcatgaggtatttttaagcagttgcttaaaaagacagcattgcgtgaccacaaccctggggtggctcataaacccaagcctgtaggaatcttgagataagctttccattttactgagcactgctcaagcgcttcctagaatattgtgtttgagccccgtaattaaagaggaaagaggaggcctgggagaggttccgagaagaattgtgaggatattaaaaggttggaaacaataaagcttgtgggagaaaaaaggttaaaagaactgggattatttagactgaaggacagaaggtcaaggagcagagtaacaataatcttcaaatacactccttctagcgtcagggaatacagctaattcctcactgataaaatagtcagttgaggcccgggtacacttgctatacggacttgttagcaaataagacagagttcagcaaaatgaaggagctgacagctcaggcggtcgcagtctgcctgattgtcctagatcttcatcatgacccctttgcaggagccatagagacccagggtaggcaggaagcctggtaggagatgcaattctttctagacagtgtaaactctcagtgggattagtgaaagccttcgtgtgagtctaagaaatatcccccaccaggtttatttatctattaaacaaaagtttattatttttcccattgtaaaagtaatgcacactctatcaggaaaccagttgctttctaaataaaagcaaatccagatcttccagagttgtcaatgaagggagaattctacatgggtgtatgggggaggagggaggaagaggggaagagagtgaggggtggttaagacattataatgagactttactaaggttttaggattatctgaaaacttgatttacaacacaatccaggtttacacacagcatagcttcctaatcttcagcctgagcccctgcagagatgcctcctgcctggatcccactgtatccactgggaagagagaagcctgccagctcctataatagagtcaaggcttcatcctgctaagtgggcagcaaatggacaagctcaagatgggagtcagccaaggaccccttcccatgtctctttcccagtactcctaccatttccaaccttagagaacctggaatcaagtctattaatgatgcagacaaacatcaaatctacttgagggagccaaccttcctcagtccaccattcaaaggcattcatactggtgtatttcctcatagtatatatttttttctatgtttctactttgttgtaaatacttaaactgatgacatgtatatgattttgcaacttttttcacctgttttagtcaagttaaactaatctaagttgtacgtgtagtatgaaacccttttttttaataaatatgcacacatatgcatacttacattaaaaagactgggaggaatccacccaaaatacaactatggttatctgtaggtgtgggattacaaattattttatttttgatgttgttatcattggtattcttcacaattaataagttttacttttgtaaaaagcaaaaatacattgttgcacaattacaacataaaaatttctcttattattatgaactctgaccacaccgtttctttagttttgttttgagacagggtcttactttgttgcccaggctgtagcgcagtggtgcaatcacagctcactgcagcctcaaccacctgtgctccagccatactccagcctcagcctccagagcagctgggactacaggcatgtgccaccttgcctaactaatatttttctttttttctttgtagagatggggtctcactacattgccaggctaatcttgaactcctgggctcaagcaatcctcctgacttggcctctgaaagtgctaggattacaggtgtgagctaccgtgcctatccctgaccacaccatttctaatggccttttgggcgagggtgtggctgatacttcatttaattattccttcccacattgctgaagttaggctgtctcaaatgaaaggacatattctcaataggatcaatctaactcaataggaatctaagatacattcttggaagggaagctattaagttaaatgacatgaatgttgctaaacctccctgcaaattgccgacagcccgttctctctgatgacaaacatgctctggttttaatacccttttctttagctcttgtatgtttttctctctctttctttttcttcttctggctggattcaggcttgtgtgctttcattgtccctgctttctggtattgattgctgtgttccttcctgtcccatttctctccctacttccgttgaggaaggcttaagacccccagtgttatgggttttccctgggcatgcttccttctggctcctgccaatgagatgacactattattaacttacaaacctccatttccgtcaccttgaaatttagaacacaagaaagcagtaagcatgccaaagtgccaggaccataacatctgccctgagggattgtcataaacaataaatgcttaccctactgatactgtgaatagccttgacaaaactaataaacctaaggtctaaacacatttctgatatttctttgatgtcttgaacacagcatagtgttttccatgcctagctagataggcagccataaaagatggtggattatttttaagtttatctgatgcatatgacttacagactgctgatagactattatagatgtaaaggctctactctttgccttcacccattgtctgaagacatcagccaaaccgttctgatgtgaacctacatgtgaggacctcgactcaagcagaggttcccactgctgaaagttcatgatctggtccaagagttcctggcttttcggagttatgctattgctcattctacataataaacaccattctgtgcattttccatcttcaactcacaacctatttgtggctttattggtcacattcatagaatttcagagctatcaaggatcttctaaaaaactaaggtgaaatttacataacataaaattaaccatcttaaagtgtacacttcagtaacatttaatacattcacattgttttgcaatcaccatctgatatggtttggctctgtgtccccacccaaatctcatattgaattgtagttcccaattttgccagttttagaggtggggcttagtgggaggtgatttgatcatggggccgggttctaataggttagcaccatccccctagtgctgtctcatgattgagttttcctgagatctggttgtttaaaagtgtgtagcacttccccctttgctctctcttcctcctgctccagccatgtagtgtatcaaccctggtatctaggtcaaacattattctttgtaggtgtcatacatgcttatcttttttgtaatgaatcttgagcaaatgcaagttaagttgtcctcaagaacattctcatatctagaatacatgaaactaaacaaaagatattagagcaaatacagagtcccttgacaaggggaaatgcataagatctagaatcttccaagtggacacttcttgggcccccatcacagtcttcttggtgcactccagccattgctgtagcaagctcctgtccacagatgtaacctgacaacactttgccttggctgtcctgggtatgcctgttttctgccctgggacatccagtgtaaagaagacctataggtatccacttcgtagtgtagatgcacaagcctggaagtacaagagaactaatacgccaaagggcaacaattcaccaaaggccaggaagcagaactgatggatcaagacttccttttctatgccttgagtgaacagatctgagttatcttctatatggctcttcagagggtctcagtgaaactcaggtccagctgctcaaggcagtgttcagctcacttacactgaacagtaatctttgtgttgcctcccctctttcactgtgacactctttccagtctccactcttgtttcctggggtcatttttcaaaataaactctctgaatgaaagcccatatctcaggctttatgttatggtggaaatccaggttaagacatgcctaagtgtaggcactgctgttatccccgttttacatctccattttaaagatgaggaaacagaggtccagagactttaggaaacctcttgggcacatagctggcaaaagacaaagcagagaatcatgcccatctgatttcagagcccaagtgattcacgtcacactctttccacttagcctttttatttatgtccctcccattgtctcactatcccaggagaagctaggtatgtgcaaattcatctcaaagccttctcactgtgcccagctccccagcctcatctaccttttgcaagatgtaattcccaaataccagaggaccaaactcaaatgcttcctgcagctgactttctggtaatatttataatggctaacatttattaagctctttttaactgtgaagccctgtcataagtcttttaaatatatcagctcacttaattctcactacaaccctatgaggtaggcactcctattatccgaccttaccagtgagggaactgaggcttatggaagttaagcaataaccaaagacacacactctgaagaagtggagtcatccttccaagccaggtagtgtgacttctgagccaatgctcttaagctattgtttccaggagaatacagatgagtaaagctggctgactaaagcacaataggcaatggcaggtattgcagcaaattcgggaacacaaactactaagagtggggtggggatgaggaggcaataaactccttagctaccattgatggttgcctaaaagcaacttcagtcttctgatttttcaaagaatccaaaaatctagattttatataaagccttctaatttgtttaagactattgactaattcatatttaaattactctgggcaaaccaaacaaaataggtctattcatcaaattttagccctctgcataacagtttgcaaagtctatttagctattcggtaagttccctcttttcacaaagtatagttattattgtcacaaaggactcccatcgtagtctataacttgtgagaaagataagattcatcaggaagagtgatataatgggattgctttaattgtcataagccacctggagcaattgtttctaaaataaccagccaactggatattgcattttgatggaatattaggtcatggagattgatgctggcttatgaacccataagttcttagtaatggaataaagatgaagtattctatactgttataaatctagtctttacattgtgtagctggacaaaacatcgtgtatttgagaatataatattccattccattctgattggaaaaaagtaacgtataatgttcattttagaaaatgtgaaaaatacagaaaaggcgaaaaacacaataatcattcttaaccctcctgttcagagataatatcaacagtcgagtgtggttctttttagccttttttttagacatagaataattttttatagataggtctcatctcaaagtaatgtgaggtttttaaagaatttgattatagtatgaatatagactcaaattgaagagttcaattctgcctggttcaaagccatttaaagtgattttcatgttttcagattagtatagtacaagcatttttaaattgcttgaagtggcattttttccctttttccttgcttccagttttctaacattgctttttagcattaaaataaatttttcatatacatttttaaattaaattttgtgagattcttttgagactctcttaacaactgcttatggttctgcaaaacaaaagtaattcagaaagggtcctggaaaggacatctttctcatgagagataataaaaagtttgagggaagattttttccagtgtataagttaattctccagagagtaaggcatttggtggagctgtgtttgtcctctcaggccacttgaatattgcaagttttttgtttgtttgtttgtttgttgagacagagtctcgctctgttgtccaggctggaatgcaatggcgtggcctcagctcgctgcaacctccacttcccgggttcaagcaattctcctgcctcagcctcccaagaagctgggattacaggcacccaccaccacgccaggctaattttttgtatttttagtactgatggggtttcaccatgttggccaggctggtctcgaactcctgacctcaggtgatccacccacctcagccttccaaagtgctgggattataggcaagagccactgcgcccagccgaatattgcaagtattgatgaagcagaaactaatctactaaataagaccttagcagcctaagattctgaacagccctgcagtaaatgctgttttttcttaccctaatccattcctctctttctccttcctaaaaggaccataatttttgatctgatgtatacctaatcctacttactctaagccagtctcctgttgactatgattattggtccagggtaggtgagacctatggcggcacaatctgacagatgggaggattttattccatggctgggaaaaagtttatttcactcaagtttactcaaacaagggaacaagtaacccagacctgccattagcaaccaaactgcaacccagagtgaacttggcataggctaaagctaaagcagaagacagcagagtgaaaacatgcacagagtctggatctgtgagttaccatggagtctcagaacataccgcatccgaggcctgtccaacaactgtctcccagctatgcgagatattacctttccttattgttttactctgcatcaatactgccagttactcacagcctaaagcatcctaactggtacaagctctacaaggcacaatttctttttaagcttctaggtgttaaaactagttttgtattattcagaagttaaactgacagaaacagttctatatttttgctatggcaaatcatgataaacaagagtatactagttttacacaatttaattttaagagattcaccaccaacagggtgaattttactataggtgaattctaaattaataaatctgacttaaagataggttttaaaatatcactaccaagaaaattgtgtatcaattaggattgtgtttaacttgctcgataatggcataactcaggctctttctctttcagttctgccttccttaatatgcttgattcagccctggggccaaattaggagaactctcaagaacaaggaaaattgaacaaatgaaggatctgctagctaagatgaaaagcaaggggagagatgacttttacgtaggcaagaaagagggcgtctaccacagtcagtcttgactccaacttcactccaattttctaaatctctgtgcatacatctccagtaacattaaatctaattatattatgaccattattgccatcatacaaagatctcaaatcacatacttaaaaaatagggaaataatacacttaaaagataaatgcgttaaaatcatggaatcctggaaaatcgcatcaatttctttgttatgtctggaagagttgacacataccaagcttagagtcacctaaaatcctggtcttttaaaataaaagttttgatgataaattcacgactcctctcaagtctttgtttcaccattttgaaggtccagtcttcttgatgagattaattacctcttatcagcatgggtaactctctaaattacccacaacacagatgaaatcttatttatttagattagttatataaattaagaataaacccatgagccacaatatgaacaaatctcaaatacatgctgagtgaaagaaacccaacagaagagactccatactgtatggatccaatcttaagtccaagaacagacaaaattaatgtatgatgatagtaatcagaagagttgtggtgggagggactaacttcgaaaggacaaagaaacttctggagagatgggaatattctgtgctttattctgggtgtttgttatatgggtgtatgcaattgtcagaagtcatcaaactgaacgcttaagatctatacattttaacttatgttaattacacgtcaataagaacattaaaaataatatatttgcacactcctcaagagatgacacaaattgtggcacatccattgctgaaatactatgcagctttgaaaaaagaatgaggcagatctgtctgtactgaaataggataatctctaacacaagtctttaagttaaaaagtaagatatgaaatagtatgtagaattgctgtcatttgtgttttaaaaaagaggagaagaatacactaagacatgtatgtttgtacacctacagaaatagtctggatgatacacaggcactggtatcagtggttatctctggggacagaatcagtaggatggaagtggggtatatggagtgaaagggtggagggagactgaatgttttcactgtaatgttttgaaagaaaaatgtgctgggcgtggtggctcatgcctgtaatcccagcactttgggaggctgaggagggtggatcacctgtggtcaggagttcgagaccagcctagccaacactgtgaaaccctgactctactaaaaatatagaaattagctgggcatggtaggtgcctctaatcccagctacttgggagggtgaggcaagagaatcacttgaacctgggagacgaaggttgcagtgagctgagatggtgccactccagcctgggcaacagagcaggactccatctcaaaaacagaataagaaaaatgaacattaatttaatatgttgggatacataacgttgggctatacatgttggggtatagttacatgtgcgtaagttaactggtacagaccattgttggatgttataataatccttggaggatgacagccaggtgcaggacagatctactggaatcgtgtgtggggttgggtccatgtcaggcctgccatggtaaatttgattattacaagttgagtattctttatccaaaatgcttgggaccagaagtgttttggattttgcattttttcagattttgaaatatttgcatatacataatgagatatcttggggatgagacgcaagtctaaatacaaaattcatttctgttttatacatactttatccacatagcctgaaggtaattttatacaatatttttaatcactttgtgtgtgaaacaaagtttgtgtacattgaaccatcagagagcaaaggtgtctccatctcagccacttatgtggacaatctgtggttgtttgggatcgccaacaatcattcctgactctgaatttatatgcttctgattagtcattttcttacatttactcacacataagtgcttagtaaaaaatatgacataccattaatagagtggaaaaataacatgtttggggtaactaagcagcacggtaacctcaccagaatacctgcatcagctatgaaacagcaagaacaaatgacagacgttcggtctccacctatgatactggtttgtgtttcaattaaaagtttactgtacattttagtttatgtctttaggtgagaagaaatgtcagaagcaattgagagaacaggaagttgtccagaggtgaggaaggattctgctgggtggcttttttaagtggttgggagggtctttttttccttggggatgctggatacattgtgttgtgcacctgctttttgactgcgacccatcacttgaggtcaggtgtagaatttcccacttgtggtagcactcaaaatgtttcagattttggagcacttcggatttcagattttcagttaggtatgttcaaactgtactacgtctggagctgaaggaagttcttttcaccatctgccaggtggtataaatatcattctagctaaaactccctggcctcctaggcatccctccttctaattctggtctaatactttgagacatctaagtccttagtatgccagtgactaaagcaactggatgacataaatgtccaatgtgtgtttgggtaaacacaaggcttaaaaacataaggcttataaaaaaggacctagtacttccccccgccacccaccgccccaagcatgtttatttgacaaaagttagcctttcatggccaggcacggtggctcatgcctgtaatcccagcagtttgggaggctgaggaaggtggatcacctgaggtcaggagttcgagaccagcctggccgacatggtgaaaccctctctctactaaaaatacaaaaattagccaggcatggtggtgggtgcctgtaatcccagctacctgggaagctaaggcagaagaattgcctgaacctgggaggtgggggttgcagtaagccgagatggtgccactgcactccatcctgggtgacagagcaagaccccgtctcaaaaaaaaaaaaatatatattagcctttcttgttctggggtggcaagtcctcttcactctggagaaagaggtctctttgatctcaaaaccaaccttggtgatgaatgaaagcaaccaatagaaactgccatcaccacttaggaagtatcaggtgattattcattttctgtggtgcacagctgacctttattgctgctgctgggccagggtatgtttgacaaggactcatttcattgtatattttagaactattaaaatatgttcccatgtgcatatatgctacctatttaaataaattcattaaattaaaaagagtaaagatgcagagcaaacaggaggttaagaagaagcaaaagctatttgcagcaattaaggtggtcctgacattaacgtggagtgagcgttgtccacctggcctgccgatcagccctctttaggacagatgcaccacctgttcatccacacttgtcagttagcacttaccatagcctctttgttcttttttcagactaaaaagattctctcacatcaggcaccactctccagccctcctggagatcttgattcactttctctgtgcatatggtttaacttcacagctacactgtaagtgatcttgagaagaggcacctggtcttatatatttttttggaacccatcccccacaaataactggctgctgaataaatatttgatcattaaagtaagtaactaataaatgtgaaggtcctgtttatctcaatatgtaaaataattactaatgatcatgtgagacagtggtgactccaaacaagttccagccaatccagatttttaaaaatttttgcttttctatttgaatattatactaacgtgacttgcttataaaatacattgtcctcaaaatttgtaagtataatatgcacaaatcaaatcctgttttcagtgctccaggggctcattatttaaaacagtgtatctcactgttttttccttaaaaattgatattatactcccatcggtaacagtataatttttttgatatgaataaccatagtataattaatctgttttctaaattcaaaagtctaggtcatacatttcctaaagcaagcctcaactgtgcctggattaacaccaaaatgactttttttctgggtcacacactcaaatcctaacttagtctctctttttatttttattaatggatgtcagtgaatgtaattattaaaggggacaggagacaggattataaaagacaaaggaataatcttagaatattaaaaaagtggaggcccaggagctttatataacaatgaggggaaaagaaagactgtccctgggagaaaagaggtcacttacctaggaagtacaggaaggcaagtgggctggagaggggactcagagaacagaaactgaacaagctcttgcatcaacattgaaataagaagaaagtggtgaggagctgtttgagaatcaggctagatgagggctgatcatccgtttctgaatgttgaaggggaatcttgaatttgagggtttttttttcctcaaataggacacatcttcgcctagaaaaccagttgtaggggacagtggtcccctggagatagagagagctatatctgctgttgtctgcacccagaacaaatacaacatcctaatgtccactatgtccaagttggttctttaatgactttgttggtttttatttttgtttttgttgttgttttaaaagcagggtattttttgcttgtttcttgctttcttgtttgctgcatgtgtgcattgaagaattgatctgaagcatgaggacaaaccatttcctagccccctgcttgtatctgttcataaggaagcagcttcctccaaacagctcctgtgtccactggcaaagctggcctcacctccatcttgctctctagtactgatgcaggattcaggggggtagaagagcggggtagaagaggtagccactagctgttttccttgtttgttgtttctctctcctattgggatgtgagctccatgtgggcagggattgctgtttgttttgcactaatacatatatttctagctcctggcacagtgcttggcacacagtgggcacctgataaatatttggattatgaacaaatgaataaattggttgcaagcctgacagcttgctctctgaaaggaatggcaggatttcagggagagggaggtagagagtgtcaagcacagtactaggctccttacatgagatatccattgttgagaattcacctcagctagtttggtcatgtgacagttactggttattctggtattagtctcctctggccattaagatggataaaaagccataaattccttctcctctaacctccccgcaacataccgtgtaccatctagtaaggtgatatgttacaatgaaaatatatcctggaccaagttatttgttttgttttttgttttttgagatggagtttctctcttgttgcccaggctggagtgcaatggctctatctcagctcacagcaacctctgcctccagggttcaagtgattctcctgcctcggcctcctgagtagctggaattacaggtgcatgaccccacacccagccaaattatttttaaagtacaaacatttattagcagatggccacaaaaacagtcacacgggctgttcttgtaagcttggaaaagctcactacttgtctcaggacttctgaccacacctttaatgagaagctcactcggagtctttccccgacattctgaatggtggatcagccaatgctcccaatatgtcagagaaacggagccctctctgaactacgagatgaacacaagaccaaacagtccgggatggatatgcagctctgaaggtgccagattcttaccccttccagcaacagcagtatggcctactgaaactttctagtcaatgacatatcttgagcaacattaatgtcaccaatggaaaaaaaaatgtgttatatcccttacaccggctaacaaaccttctggtgtgtattctgttaacggatatttgaaatgcttaaacagccacctctgggggtagattcctgattaggttctttaaataccaaataaccaataaccaactcccttctctcactccctcccctcactgcaggaaaagttaacttacacatacacataggttcatttgaaggtactgtagattaccacatagaaccattcaattctcacaacctttctggagtaaaaataagaagagaaaatgcctagaaagcatttatgacatgctcagccttgtttaaggagttgtattctaatttaacctttacatcaactccacaccattattgcccggattttacagacaaaaaagggaaagcccagggaagtgaaggaacacatccaaggtcacactgctgataagtggtcaggaccacgattgtaacctgttgttgagtttcagagcccacactccaaaccaccctattctgctacgttttcttctgaaaataagaattattggaatattaggtattccacgtccccaacatgtctttatctcttttattcttcaaaagcaaggatctaatgttcctggaggcaaatgtgttcactgatagtccccacagaagttgaaggcgctcagcaacagttcgggcgaatttatgcgtgggtgccattcaggaacaatcaaaatttctaaaggtcacattatctttttcattccaaatagaatttgatttttgagcctcaggggaagaaataatattcttagaattcctttaccacctttcaaaatcaaaaaatatcaaaacttcaggttggctaaatgtagtgactaaaatgggaatatttgttatatttggaaagtaacaactaactcagagacaactttctactctctcatgctgaaattagctaccaagaaacatcactaggactcctgtgactcattactgttgaggagataagaatgtgggctttggagtcatcaagacagagttggaaattcagctccaccactaaatgtggctcttcatgcaaactactgcacctctctaagcctcgattcttcattcatgaaatgagaatgatgtgtgtgtagttcctaacagactgttagcagtagcggattcttacaggtctgcagcaacctggattcttgcctcaagttttgttgagaggttgtgtggttgatttctgaccttcttaaattataagtacaggtatataaaatgtaggctagctacagcatagccaaagcccaggagctgattaattagcctcagttgacccagcaaatagccttgatagagttttcatttaggcttgttgatagcactgcaagaggctattcatcagaagcgtgtcaatcctgatacttggttgcattggttccagtgctggagacaagaaagctgatcaacatgggtttcatagattcaacaaggtggtctctggtgttttcctttccttggtcacattgcagttccagttcctattgagaagggtctgaatgctgtcctttcctgctctctgccttgctgtttgcttaccacttgagaagcgatgggagctagtgctgtgacctccagctctttgcaatgtaattgagtctataaaaccatgagtcaccaggaccacatgagctacagaaagctcacacagtccaagtatataaaatgtagactaactaaagcatagccaaaggcaagtcttagagcaggagtgaaagttcgttaaaaagtattagagcaggaatgaaaggaagtaaagtatgcttggaagagggccaagcaggagacctgagaaatcaaagtgccctgtttgacttttgacttggggtttcatacgttggcatgcttctggggtgttgcatccgttctcccttgattcttcccttggggtgggctgtctccatgtgcagtggcctgccagtacttgggaggagccacatgtgcagtgtgtttactgaaattgtgtacatgctcacttgaggcattcttcctttatcagtcaagtgtttctagaggaaggtcatataccagttaaactccaccattttgcctcttagtgtacatgctcaagcccactcgcccaactcctgagatcctatcaggaagcttctgatcactaactttcggtgttttctatttactgggagactgcatttccctggcactggctgtgaccaattgttattttagagagatagttttgacagccacctgaccatcacatgatggttatctgacattcctgggatcggggcacctctcctaccctgtgcatatttgccttactatctattgtaataagatcataatataatcgcagtaattattaggatgtttattattccagggaaatttgtatttattcaagcctcctgaggacaaacagccagaagagtcacaaaagcaaggatttccctgactttgcaaattgccctacatagaaagccactcccagcctggctttagtatgcatattttgagagcccagtttattgatgtataatcactccatataggtgggtaggaagttggtttatgccctagccaagttctatgtaacttgctttaggtaatcagacaggggaagctgaagtcaagttgttctctttggctggcccttccatctcatgtgaagatgtccctttaaatagtgctgctctgtggatgtaagaagtagacttccagttcaggaggcagttcaggaggcagaaccagaaccagctggtaaggatttttccagggatggatatggactcagtggaataggaagtagtgacttctctgttactggaagcattggaggaaaccagtgattacaggtcaagatgggtggagaggacattcttgccttagggggaacatggagttgagaataatgggaatgttaatgaaacatggtttctatttattgaagccatgtgtcaacgcatattttagttcatttaatcctcacaggaatctctccaattctatagtattatgtttttcacacatcactaaacaaaagctcagagaggttaagtaatttaccaaatctcacacaactggaatgatcaatgttgaagttttgaaccagagcctatgctattatatcaccacccaaaatgatcttaaaactttctttcttttttggaaacagatctcttatactacacaccagtttataaactgttagagttatgttgtattaatatatacttattttacaatttcaaatatatgatatttacttgttataaagtcattcatgagaataattactgaagataagtaattgatatctgaaattataaatgacagatattatttaatatcaatcttaatattcaaattatatttttattttattttggcccacagtattgcaaatggtacagtgttttcactgtcctcgttcatatctctggacagtcttcagttgaactgattcagaagctggagagaagatcagtaggacattttgtttgaagtctgaattattaacaataacaaccatatgcctgtcttataacccagaagtcagactagaagtacccaaagcttacagaaatgccagaacatcattgatatctctggacactcttcagctgaactgattcagaagctggagagaagatcggcaggacattttgtttgaagtcttcatcattaacaatatctaacaaccacatgcctgtcttatcataatccagaagtcagactagaagtacccaaagcttacagaaactgccagaacaatctatgatatgatattatcatcacatggcagttactcactcagcaaatattctttctgagaggcggtggaacacgttggttacaagcacaagctttgacatgaagcggctcagctctaccattaaccagcagattgaccctgggcaaaattctgaacctcttccagacttattttttcattggtaaagtggaaattgtcatgaataattactgaattattttgggtagatagaggtaacctctaataggtagaagtaggtctctcccatggcatgctgaacataggaagtatgtcaaaatgaccaggttctgccagatacacaagcacttactaaataatcattccatcttattttatgtgagctcagtgaattgccaactctctgcccttttaggcactttgacagtaccttgcatgaacgttttacttcaggctggtgcagcactagtctggcagcaggttcagctaaacttctagttggtcaggtgacataatcctccattaaatgtcttacacccagaagtaattggaatcctaagcacagattactatttgaagggtgtaggctattgtgttaggtaggttcttatttcctgtatattccaggtcaggagtgcctattcaatatttccagtcaattcactcctgcctgaacactattcatttcttcaatgaagagtcatttctatatccataatgctaattagaaaaacttctggtgttgatcagaaataaagacagttatgaatttgaattatggatatgagttatggattagagtctttgaaatgtaaactaactctatagatcgtatatttttatttaagaaactgcaagtgttaactactagcctttaggataaagagattaaagttaggacatactacactgaagtacttgtaagtgaattacaaataatataacaggggaaaaattctcacaagaatgttgtgagaattaataatagctaattttttgaatgtttcctagtgccaagtactatactcaggtaatcatgtgcatattctgatttaatcattataaaaacaccatgagggagacaatattattaaatgaattatgagtaaatgagcaaataaacagtcactagttagcattcttcccagtgcatgataaacatgcaataaatggtaactattcttattttgcggatctgaagattgtgtcacgataacaaactgttaccagcagctgggccttgtctgacacttaaatgaatatgacacatgctaagctgatgtcaaatgcttccctttaaaatttgggtgaatgtgggtgagcctgaattttataaaggcctgttcagacctttttaatcaatgacatatatctattaaatgcaaatacattcacagagatgacagatgtttcttttttttgtttttttgagacaagagtttttttctgtcacccaggctggagtgcagtggtgcaatctcggctcactgtaacctccacctcccgggttcaagggattctcctgcctcagcctactgagtagctgggattataggcacgtgccaccacgcctggctaacttttgtatttttagtagagacagtttcatcatgttggccagactggtctcgagctcctgacctcaggtgatccaccggcctcggcctcccaaagtgctgggattacaggcctgagccaccgcacccggctgacagatgtttcattctgaggtctatacaaatggaactaacctacagcgtgtattgtgtcgacggtctctaaatgtgttaaatttgccatagtgcacatttggatgtatgtgtaatttttttaagtctcaggttttttaagtctaaggtttacaaatatttgaaaaatgaaatatgaatcaaacatttgtggagtacctgaagcatttcctgccatgaggtcccagtttgataaccactggcctaaatgactggctggcatccagcgctcatctcaatattacaatcctatgattcaattattgctaaaagcaaaaatctaagatctgcaaaagcccagtctcctaaccaatgaacaaaatccagctactctttattttaaattccaatcaacgtagagaacatgatgagaaagatgattcattacggttgtcactcacatttttttctcattgaataaacatgattatttgccattcgctagtcagttttctctcttcttttaaggctttgtgtgtgtctggctttaaacactaaagaaatgtcataaagtttcataaagtttcctgatctctacttttaaaggagtcatatgcttctgcctcacaagactggccacagtctcacgatgggaagaacacgctttgccacaaggtttctaactgcagatcagaaacttccaggtttgaggccaacactttcagtagcctcctgatgggctgacttgtcttctcttcattctttttctggaactggaagtcgtaattcttcccttcttgaatcggagtaggtcactagggtaacaggaatgagtgaagccaatagaaataacttccttcaggggagtgtagacatcagtgtaaaacgaaaaaaaaagagagtggggatagcttcaaaaagccacagagcgggcactctcccaaaggcagagcaggtaacaaaatctttaaagagtccagctttacagctgggtctctggaggggattaaaaactaaaaggcatggacatcatgacagagtatgtctagatacagaagacacagaaacagcaaaacgctaaaggcaaccagagcatccaaaaagaaaagctaattcaaaaccacggatgtaattactaagattaaaagagcaaatgcccttcttaaattttcagaggaaggttgtaaaaatcacttaatttaaaataaagcatatctttgatgtgaaaacatacaagcccggaagcaaagaaaggtaatataattaatttttagatcaaattttgaatgaagggaaatattttacatttgtttgtctaacttgcaaacattaacaagcaattaatgactcctaaattcaacaaagttattagcaaactaataaaggcaatcatagccaggatccagttagtcaactcaaagatggaaaagactgaattagctaaatgaagtcagatgatgaattaaaaaaaaattaaaattaaaaaacccaccactttcattaatggagaaattaagaaaactgctaccaactcctgtgactttctgtcacctcaggccatctctgctctccttcttgtctgttgattgtcttacttcgattacaaggcactgaggcaggtcacatctcatggcctcattccatgttgagcatttccttggcattaaacggagtatattctgcggttcattagttcattcatccagcaaatgactactaaatgcatattgagagcaaagcattgatttgagtctgctagttatacaaagataaaaagatatgaaccctgcccttggaggaattaacagtccagtgtataaaaataattacaatataatatgcatacatacctaataataattacaatgctgaggacctttgaaaaaggtgtaacaggaggtgagagatgaagggaaggaggctgaagcctcctgtggagaaggtcgggctacagctgagagttaggggcagagaaaaagtggttagctgtgagaattaggggtgctgtggactccctgaagcctaccaggtcatatagaactccagtgcaatttgctaaacaatcactgctctcactgaagaagtttcaggcaggtgagagttagctactcctccattcttaccaccacaatgaaagcaaggttcagaagaaaaaaaatctgccaaatataagatatttattaaagaaacagtcagtcattaacaaggaagcacaaaacagttcctgctgtcggttaggtgaactggcagttctctgtccttttgtgtgctttgtgtgctcagatcacccctgtgctgtccagtagacagaatcacattccagaggcaggattctgtcaaccttggagctggcatcaggcaaccataaatccttctaatccaaaggctggacatggaactatttagggactcagcttcaagtgccatccctaagagtgcaaatctcctaattcttagactctgtgcatacaagagtaaaaaaggtctctgcaatattttagccaatccacattttaatatctttaatttcaaccatgaaagcccactgcaagaatctgtcttgctatataagaagccatcattacaccaatgaaaaaacatgtcagacattcactatgttgatttgaacaaccttgaatgttgatcaagatctagctaacacaaactaatgcaggaacagaaaaccaaatactgtacattctcacttattagtgggagctaaatgataacacgtgggcacatagaaaggaacaacacacactggggcctattggagggtggacggtgggaggagaaagaggatcagaaaaaataacgaatgggtactaggcttaatacctgggtgataaaataatctgtacaacaaacccccatgacacaagtttacctatgtaacaaacctgcacatgtacccttgaacttaaaataaaagttaaaaaaaaaaagaatctagctaacagaagcacttgcagactctctagagctgcactgtcctgtatggtagccactagctatatgtggctattgagtgcttcagctattgagtgtggctattgaattgttctcaattcaacaagtccaactgagatgttctgtaagtgtaagatatacaccagaaatttcaagacttagtacaaagcaacaaaaaatgtaaaatatctcattaatcattttatattggttacatgttgaaataatattttgtatatattggattaaataaaatgtacataagaatccatttcacctgttttattttacctttcatattgtggctgctagcgaatttaatataaaatatgtagcttatattttatttctattcggcagagctgttctaggctccagatcatggaatttcaaattagattgcttgccagtattttcttgaccttgcattcccggtgaaaatgccattagccttaggtatggttgcatgtagattaacctaagtagcatgcccataacatcaaactgtatatgtcaaagtgttttaaagtaaattcatttgtttacttattaattgcctaataagacagataaaatctgtactgtcatggggatttatgttctctctggggtagagagaaagaaagtactgaataacaaaaagtcataaaatcatcagcgtggtgcagggagtaaaatggtgtgatgtgttaaagactggctggacagcttctttaagttgaagagtcagagaaggcctctctgaagggatgacatttaaaatgacatctgaatgacatgaaggagtctgaatgacatgaaggagtcagacatgcaatgatgaggtttgttggcagtgggtggggaggagttgttctaggctggggaaacaactaatacacaagctcaaatgtgggaatgagcttggcttgacaagaaagagaataatgcataaatatgttaaaaccacgacattcaatgaaatctactagagagggaagatgaatataggagccctctagggctcctccttcataaatgaaggagaaggcacccagtttcaagccctagagggcccccatatttagaggttgagtggagaagaagatatccacaaaaggaaagaggaattagggaatccactgtgggctctcacagaagccaggagctgacactatttcaagaggaacaagtagttctgttgaaagtgtattgctgaagggctgggagcagtggctcacacctgtaatcccagcactttgggaggccgaggtaggcggatcacctgaggttgggagtttgagaccagactgaccaatacggtgaaaccccatttttactaaaaaaaaaaaaaaaaagaaatacaaaaattagtccggctgtggtggcacgtgcctgtaatcccagctactcaggaggctgaggctggagaatcgcttgaacccaggaggcagaggttgcagtgagccgatattatgccactgcactccagcatgggtgacagagggagatgctgtctcaaaaaaaaaaaaaaaatgtgtttctgaagggttgggtgagttgggtaagaccagtaattactgacttcaactgattgggagccattggacatgtagcacaagccatctcacctgggcacggggaatggaattccattaggaattggttgagacgagaacacgaggcaataagtggagacaaaagctctagtcagcccgttcaagcagtttttctgtgatggcagaggaccatgttgagcctgaggagcagcagggatggatgaatgtagataatattgagtgtgttattgctggtagaggtaagggtgagagtagatggacaacgtcacaaggaaactttgaccttgtgacctcacctgaaaggtattgagcagaggagcacggtaatcagatacaagaagaaacaggaagaagagaaagaacagtagagggctttgattaagaggcaggggtcaggccgggagtggtagcttacgcctataatcccagcactttggtaggccaaggcggaaggatccactgggcccaaaagttcaagaccagcctgggcaacatattgagaacctgactttacttaaaaaaacaataaaagaggcaggggttgtccttgtacattccccccatcatgggttctacagacctcatggaaagttttcgaagaagatagttcaggagagagaacagtgcagacatccttagtagaagcaagccaacttaacaaaaatgaattcactcaaagtcaattcaccaaaattcactttgccaaattatcaattcacttaagtcatcaaacttttcattagccaaaagttgttttggtagaattcacagaaagctaatttgctgaaagcttaattgctaaaaaccaaatcactgaatggccagatccccaaattatccattcattagcaactctgtatcataaagtttatagttaaaatggtaaagggacaaaggatatggacagggaattcacagacaggaaagccctgatagccaaaaagcatataaagagatgttcaaactcacaagtaatgaaagcaacgcaattgaaaaaacactgaaatttgattttaaatacatcaggatggcaaatactataccgaaagataatactaaatattggcaagtaacactatttgcaatccctgggcaacagactctcagcataagcttagcatgaaaagcatttattagtaagcaccagtgggagaaacatctaaggaagggtgtaggaggaaatagtacaggagcttcagtgctgtcccaaagaaagcccagccatcctaacaggcatcaggtcatatctcttcgtggctttgatttgcggttcctgatgattagtgacgttgagcacctgttcaaatataactattagccatttgtatgtcttctttggagaaatgtctgttcagatcctttgcccatttttttgttggttttttttgtttcttgctattgagttgaaccccttgtctattttggatattaacctcttactagatgtatggtttgcaaatattgtctcttcactcctgaaagaatgactattatcaaaaacataacaagtgttggcaagaatgtggaaaaaaatccttgtacactgttggtgggaatgtaaattggtacaagcattatggaaaacagtatggaagttcttcaaaaaaattaaaaatagaactaccatatgttccagcaatctcacttctgggtatatatccaaaggaattgaaatcagcatgtccaagagatatctgcatacccatgttcactgcagcattattcacaatagccaagatatggaaacaacctaagtgactgtcgacagatgaatggataagaatatacaatggaatgttattaagtcttttaaaaaaaaaaaggaaatcctggcatttacaacaaatggatgaacctggaggacattatgctaagggagataagccagacacagaaagacaaatactgtagggtctcacttacatgtggaatcttagaaagtcaacttctaggagcagagagtagaatggtcgttaccaggggctgaggggcaggagaaatgagaagttgattaaaaggtacaaaactttagttatgcataatgagtaagttgtagaaacctaatgtacagcatgttgactatagttaataatagtgtatacttgaaatttgttgagagtagctcttaagtgttctcaccacacacacacacacacaaaaggtaactatgtaaggtgatggatatgtttattagcttgattgtaattatttcacaatgtacatatttatcaaaacaaaatgtatacaccttaaatttatttaatttttaattgtcaatcatacctcaataaagctggggaaaaaaagaaaaagaaagctccatctagcctcaccaggactgaagctgggtggcccctcaaagttgaaccatcatgagatgaactggttatttataccctttcaatcagatggtcagctactgattagtacgggcagtgcatgatggaaggcatgactctgagagaggtgattttctccagctgagaaccttcccaaaagggctgcagttgatgactattccagcactggggcaccaagtccatttttgaaggtggatctgagagtcatgtgagtgtagggttggatgttgtctttattttaaaattttgttttctggttgtatttaggtgtgattggtatacaaaaacactgcacatagttaatgtgtacaatttgacgagtttggacatatgtataaacttgtgttaccatcatcataatcaaagtaatgaacacatccatcatctccaacattttcctgtgtccctttgttgttttttctcttcatttaaaattttgattttattgttcacatcaaaatgtttttgcatgaattttaattttaaaaatattgcactgaagtattatttaccttgatcactaagtcttttggctctcccttaaattttgcctcactcctctcatgctaatcgcagccctgctcctggtaggtatgtgagctagctagacattcaggaaagcaagccagcagtatttagtgacattgcatgtgaatatgccttatgatgtagcaatccacctcctgggtgtgtagagaaaccatctcatctgtctgtaaggggatgtggatgtgcatctaaaaattgttatgggaccgggggcggtgactcatgcctgtaatctcagcattttgggaggccgaggtgggtggatcacttgaggtcaggagttcgagaccagcctgaccaacatggtgaaaccctgtctctactaaaaatacaaaattagcctggcatggtggcgcttgcctgtaatcccagctacttggggggctgaggtgggagaatcacttgaacctgggaggcggaggttgcagtgagccaagattgcaccattgcactgcagcttgggcaacaagagcaaaattctgtctcagaaaaaataatggctgggtgcagtggctcacacctgaatctcaacactttgggaggccaaggcaggtggatcacgagcacaggagttcaagccagcctggccaagatggtgaaaccgtgtctctactaagtaaattacaactacctctagaatgtcaaatggtctcttttcaactggaatgacaaaagctgaaagaaatgtgcgaccatgaggacactgtaacctataaatgatgtgctgagaccggaaactcaaaatatggtaactgagagtggcactaaggccctaagttttggtcacactctcacctagtgagaacctggccaaaaagggtggcaggtgcctgtaatcccagctactagggaggctgaggcaggagaattccttgagcctggaaggcagaggttgcagtgagtcgagatcacgccactgcactccagcctgggtgacaaagtaagactccatctcaaaaataataataataataataaattaataaataaataataaaaattgttatggtagaagagagaaggagagctgtagacaacttaggaagccatttctaggagatgaatagtaaaatgggctggatgcattctatggaatactaagcagtagtccagggtgataaaagaaaagcttcagccagatttaaaagagtttaattgagcaatgaacaattcatgaattgggcagcccccagaaccacagcagattcaccaagactccagggatgccttgtggtcacaacaaatttatagacagaaaggggaaagtgatgtacaggaattggaagtgaagtacagaaacagtgtgattggttacagcttggtgtttgccttatttgaatgcagtttgaatgttcagcagtctacgagtggttgaagtatgaccgcagggattggccaacacttagtcattgttacaggtgcatactattaagttaggttttcaattttgacttactattaagctaggtcacagttcatccacaaggactcaaatacagaagcagagtccttcttaggccatatttagtttgccttaacaagttccctcttttggtcattttctcaattttaagagattgaccaaaatcttagttattgatgctactatcgctatcataaatgtacttatatggttttgaaacccactgggaaacattagaacagtgggttttgcaaggaaggaataaggactgaatagagggtgcttccgtatgctggaacatcctgtttacaggagaaaaacaaaacctggtctgttctaggatctatgtgctttctcaaagccttaatttgattatgtcacatttagcacaagtgactccattttatcctggtttggttttttggagcctagtgcatgagctcaagtccaaaataacggcttcccataattttgttttttaaaaattccccctttttggccaggttctcactaggtgagagtgtgacccaaacttagggctttagtgccactctcatttaccatattttgggtttccggtctcagtacatcatttataggttacagtgtcctcatggtcacacatttctttcagcttttgtcattccagttgaaaagagaccatttgacattgtagagatggttgcatgtgaacagtgaaaatctttgaaagaatacagagcaccagaaagactatgattatgactattgggaggataataccaacggtttggagtatgctccttacccagggtccccataaaccaaaccacatcaaataaaatagattaaagaatgagctagatgaagagtctactcgcttgaccaagtggtcttttcattaatcccctacaactgaatttttgtaatctacatttgatgtatttctccataggccagaagtgtcagtagctgcacaggtacttttctgcttagccaattctattatttagcataactttcacaagagaatttaaagtctgttgtgtaaggatagcctttaaagtagaatttgctgtagagcctattgtgagggtgacatttctaattattgcctattttattctaaaccatggaaaaaggacctaacaaatgatatccttctacaggactgaaggcctcctggcaatgttctctttaattcatgaggagttttgactgattatgaggcaatatatgtaccatcaaagtttctcacctacactgggccttcatcttttacctattaaagcatatggttattcatggctgcaaaatccttcacaaataaagtataccctataagtgcacataatagacccctttttcatttctattgttcatagaggcataacaaggaaaaatattcaaagataagagtctgtgatagtagaagtcttgatcagtgatcttggaaaaagctgttcacataaaagatgccatcttcttctggggagaaactttcctggttacttttaccttaagggttccaatgggtgtacagttccaggagtgtggaggggcccttgtcagttgtgcgattacgaacccaaggttcaaggctccaaagttttgctgtagtgtggatggcaaggacaaactttttctcatgttctcagaagatccaatctttgggctccagattgtgaagggattatcctcagtgaaccataaaaactctctttacctggtgaaatatactgtagcataataatttactgttataacatcagccctcttgcatgggaaagcttttatacccccagaaaacatgcattgaaaatgacaattgaatgaaattcctttataaatgtttaaatggaccatcaagtagccaaacgtacctgaacctttgattgtcttcccaggaatatgtaaccaaacattggttttaaactattactgcaatttataagtcaccacatcaatgtattcaatttggattattttatctttttcatgacgagtcatggaatgcagaacctttaataacaaaagctttaagcactcaggaaggacaaggcggctgtcttggttcttcacgagtccatgcttaacactggacttatgtcctcttgaataccagttgtttctccaatttaggtgcatagcactgataactaataagttatcagaggtaatttgacttagaccatggagttcattcaaattgtatatttaaacaatgttagtattggctgatttagcatgataatctaaagcttgattttgaaaggtctgttaaatagcaaaggtttaaaactttggatattacaaaatagaattttaggttaccataagtcgttcatttagccaaaatgataactcaaaaaatttttaaaggaaaaaatactattctgatggagaggagacacagctttctaaataagacccagtggagatagcatgaagccaactgactctgtctcctttctttcccttcccccctttttctcttgtagtttacttaaaaggtaaacaaaaacctttcattatcttttaatattacataaaaattatttttaaaagagaaaaccaaattttatgtttccattggtgtatttttaatgataaagctagttttttaataacattttataagtctattaagtttaattagtttgaccataaggtaagatttttataaacattttataaccctttacattttttttttcagaccagaacaatgttctaagaaaactctgttgtgcttttattccaatgttcaatttatggaaaaaaactgaaaaatgccattttaactttagccaatatgtccacacatagaattttttacaattaattttttataaaccttccacaacttgttcaaacatttagctttatttaatttaaaacaatgctttaaccctctaacctaggcaaaaatttacattcccttaccttcttataatctcttacaaaaatactttttattctccttacacaccttgtatgtaaactcattttttcagtagtctcaattgcatattacaatgttaactcttagagacttttacttttggtgaaaatcttggtaagtaagggattttaattatgtactagatggggagcctaggacccagacagaaatgcacataaggtctgactctttccatcatctaactccacatgtcccaggccttacctagccgtaaaataggcaagctgtacagtcatagtggcatgttataaatcatttaggaggcctattcacctttatttatttatttatttatttatttatttatttatttttttttttttttgagataaagtctcactcctttgcccaggctggagtgcagtggtgccatctcggctcactgcaacctccacctcctgggttcaagtgattctcctgcctcagcctcctgagtatctgggattacaggtgtgcgccctcacgcctggctaatttttatattttcagtagagacgggtttcaccatgttggtcaggctggtttcaaactcctgacctcgtgatccacccacctcagcctcccaaagtgttgggattacaggagtgagccactgcccccagccctaatcacctttaaattatacatttctggcataaatttattttcataaattctttcatgacttacacagactatgtgagacatgtttagactttctgagtgacttgccctaaacgtccttctttttaaacaaccagtcattttactttaggacaagaatttaccatacaacatcctttcttatataaaatctattttctttatagccttctttgcatagctaaggggcatggctaattccatatatccccaggccttatttagaatgtaatgtctccagaataaattgaacaattttcaaaagtcaaagcagtttatgaccttaaagcatttagcaaatctaatatctgacctgcataatttagacaaaaatgtctttattttatcagtaatctttaaagctgtttttattttgctttctaaatatttaatttgagcttatttttgtttaagccaattaatcagagctcttttatataaacattacacacaacacatatataattatacagacagacagaagaagattaccacagtagttgtaagattttttattttgccagtttttatgtttcttaactggttattggcttttgggtggagcccttggaagaagagggccagaaagggatttctggtgccttctgtttttcccaagaagtccaggcagttagagcttcaatatccacttttaattaagctgacttttaaccatagcactctttaataaagtccttttaaaattttttattacccaattttagccaggccaaacggctggtatttctggcttttgaactctaccaaaggtaacctcccaggtgctcagagaaaggaaaattagatagtacatggagaagagactagacaaggtcatacaaatattaaactaaacgcaacttacttcataggcagggaattgaacccagaccaccagtatgaaagagcaaagccttagctactgagctccaacatggggcaatcttttatgacctctcccaggaggaatctagagtagttaattttgagcttgcaaaggcttttagctactcgagataatttttagagctaactatgacataagccctaaaattcctgttccctggaaggcggaaaccaagagaaagtaccgccacatggttacaaggtcaagctcccaaggacgtaaaacaaaatggagataaacagcaatttttaccgttcattcaaccatttgcacagagagagagagaagcctgaaatctaactggtaagaaattcttaactttttgccgggatgccaggcttctgggtacgctttccatgagcgcccctagtgactcagcttgccacaccatcgcactggggcaaagccacatcataaaggaaaattatcttttttttgtcctggccagagtaaaatatgtgtgacaaaaacatagacattagccactgtggttggcacccaatgtcaaaccagcaaggctcaaatttgcccctggttgggccccatcattgttaatccaacctccgaccaggagtttcaacctgtggtctctgggcaaggtggtctccctgagtaatagaaaacataagaaagggaaaggagagagagaaaagcattgcctgtggcaaggtggggaaggtgaaatgatcagggaggccacagaaagacccacctattgcagcgacactgaaaagttcaggccgctgcttcttggtaccaaatggatcttttccaacggtcccatcatctctaaagtttccccttttagggaagaaaaagcttcccatgtcccacgatcctgtacatgcctaatcctgtcacccacagccatcagcaaagagtgcaaggcagattatgccaaagagaacagcaattgacatgctggagtgccaaaccctttctcagctaaaagggactttaccaagagccctcattttttaaatgtacttcaatgcattgttgttctttgggaatgttccactgtaaggtatctttagtaagattttgctgtttctgtaagacttcactgcctcccaggcctaaagtataagccagaaggaactcggttttccagaaattaaggatcccatttttacctcaaatattggctttatgctcaggttctcttgattaacttagccaatgatttttttcccctacctaagcgtgcaagaaaaatgaaacaaagggatataatgcaaaaatccctgtgaatgttcaaaatccacctgttcctttctcacccagtcagacgtaagaggcctctaacttgatccaagccagttaatttctggatcaaatccattcctggacccagtccagtttctgttgcgactccaaacccagtttggatcagaaatttgttcaaagaaactcggagagctcaaaacacaaatccacggagctccaaaatctgagacaagtgggtcctgcaggtagcttgcgtgttcactcagccctcctagtggtcgctagaagctccacttcggataccgcttctgacaccatctgataaaagaaaaacttaagccgaattaaatttaaaagagtttaatggagcaatgaatgattcgtgaatcgggcagcccccagaatcacagcagatttacagagactccaggggtgccttgtggtcagaacaaattaatagataaaaaggggaaagtgacgtacagaaatcagaagtgaggtatagaaacagtgagattggttagagctgggcatttgccttatttaaacgcagtttgaacattcagcagtctatgagtggttgaagtatggctactgggattggccaacactcagccattgttagaggtgcatactattaagtaacattttcaattttgtctgtagtcatccgcaaggactcaaatatagaagtatagagtacttctcaggccatatttagtttgctttaacaagggtaatgaactaaatgtacaaacatcaacatgtgtagacccttcaaacagggtaagaaacagaagatttgtagcaccattctatgtatgtaaattgaaatcaaatatatacatagcactacagaaaaggtacatgcattttaagaacatatcatgaatacgttaaattgagtcctgtggaggtggggaatgggagtggagattggagatgaaggggaaatatacaaaataaaatcaaacatgacagggaccgtgtatgggtcaatgattatggtgttttatgaagtaagaatgattaattcaattctctagattgtgagtaaagtaaaacatatataattttcaaaaaaattaatagcaggggatgggcgcggtggctcacgccagtaatcccagcactttgggaggccgaggtgggcggatcacgaggtcaggagatcaagaccatcctggctaacatggtgaaaccccatctctactaagaacacaaaaaattagccgggtgtggtggcgggcgcctgtagtcccagctacttgggaggctgagacaggagaatggaatgaatctgggaggcagaagttgcagtgagccaagatcgtgccactgcactccagcctgggcaacagagcaagactccacctcaaaaaaaaaaaaacttaatagcaaattagttatgtgaaatggtttctaatgcctttacaggttttctgcttgctgctgaagttagagtttagttttagttttagttgtgctcagctggttcaccccagctgctttgtaacagatttgtcaatccaactcaactgaatttcaattttgtgagtgatcacatttcagacactaatcccttctcaagtgcttgaaatacaggcaaaatatttatttgaactagctgattaacaaatctgtgaattaagtgatacacaaaaggcaatgaactggaatgaaaagtattggaagagagaaacctgctctaccatttctaaatctttgtcttccaaaatgcatgcatttgaaataacaatgaaactttcactccccaaagtcattgacccaaaatatagaaaaatctggaatatattgaaatttggtcgcagaaaaacagctagaataaactagaactaagttcaaatgaaaactaaaccaaagtaaatcttcaaatttatcaattaatattgcatgaaaatctttaatatctgctaaaaataattccatccgaaacaaattaatataaacattatgaacagttaaaaagaaataggtaaattgacaaacaaggagaacttacttgaaaatccggctgatcatttggagaattcatccttagtaaattgacctggagtgtaaaggactaatcatttcctcttccctcctcaagcttgcctttgacattcatcagaactgtgggcacttggatcaaaacgctggagggtgagattggaggaggggcagtgagattgacctcaaatatgttcatcttcaaagacagccccatctaccatgtggcagaatttcaatacatgcatccccatctccctgaacctgattacaggaaaccaagcagaaaaaattaaccttgggctgaatccagtccacttgcagctgcagcccaagtggcctttttaaagcacacatttgatcatgccactccccagcttaaaccatttcaaggactcaggatcaagtaccaacagcagctcgaggcttacaagacccttcaaaataaacctgcttctttgacctcagctgaagcctcctcctcctccccagcctccaaagcctcctgggcttttcttttccatgctgtttcctctgtctaaaatactcgcttcctgtatctcctatccccaaatatctgttagctaaccctttttcaaaaatgactcccattagatacaacttcctctaggaagcctaaaattaagaaaactgctaccagtactgcagtattaggagacagttacctgtggttctctcacatttgtgcacatctcacagaggtactctcttctctttgttccagattagctttgcaagaatgtttggatagcaaacagccttagaagacagagatagggtctctctctggagcaaagggcaagttggctttcagtcttacaagatagaaacaatgtctccctctctccagatcaaagggcaggtatgcttactgcccattataaaagataggttcccttggatggagctggaggccattatccttagcaaactaatgcaggaacagaaaaccaaaagctgcatgttctcacctgtaagtgggagctaagtgatgagaactcatggacacaaagagaagaacaacagacactggggcctacttgacagttgagggtaggaggagggagaggatcagaaaaaaaataactattgagtgctaggcttagtacccaggtgacaaaataatctgtacaacgaactcctgtgacgccagtttacctatataaccaacctgcacgtgtatgcctaaacctaaaataaaagtttaaaaataataaataaataaacgatgggttccctaagctcagggtttttctcctgtaaggcagttctctatgtgtaagtacaaagatctggagcttttcatattgcctggatggaatttggaggcaaggagacctgacacagataggctgttcatgccacttgctgtgtaatgagcaataaagtgctttgtctctgacccaggaatctcatgacttctgccagcatccatgcaactacaatagactaacatcagtttgaaagtagaagacaaactcagacccttctcagttcttgacactaatatagtaatattaattttctgattttgatggttgtgctgtggtttactgggattaggtccttgtttgtgggaaataaacactaaagtgtttaggattggtggggtatcatgtggacaaatttctcttaaggaccaaaaaaggcattgtattgtacttgcaacttttctgtatatttgagattgttttactttttttaaaagattgatcagtgggctcaggtgatattagcctgatccatccactacacagtttcctgttaactttttattttgtggttttggcaattgttgacaatgattgcccaaatctgtttttcattagagattccaaaatgttgattttctaattcaattacttatttcaattttattaactgtaatacttctataaaaaagaatttcttcttgtcaactatctggttaccctgaaataaaatttatacaggaaaagcaggaaaaaaagaaattgattctgtccctttattttcaaagtaatgatttgttgccctagggagttaccaaagacatttgtttttgattgcttcggatgagcttataatttttatatagttaaagttttcaatccatggcagtcattattccttttgatgctcaaatgtctcatttcaggccaatgtaagccccttcaagatgaatccagtgctcttttgtcatgactttatcaatctttgattgcttccttgctttgggcacaattagatagcttagtttcatcttgtacatttctgcccccagatctgaaatcagtcatttctttagtgatctttgactctttttaaagggaggttggtatttacaggctgcaatctaagagctagagttgttccttgctacagagtcatcattaatttcaggcttttcagtgggcaaaggtaggacatttgcatcaaatcctgagttcatgctggcatttacaagatttacataatttctttaattttatcctttttcctatatatggaaaccttggttcctaaccaccttaattatatatttatcttatactttactgtacttatactataggtatactataatggtcttacaatacaatacagcaataaaacactgaacgtagttaaatatttctttgtggtttttatttgtccctagaatatgtcttactcaggatgtacagccaaaatgtaggttttataatcacctgttggggtggccaactgtaaacctggatagttccaggcaaaccaggagggttgatcaccctccttgaagtaattctctactctttgatttagccaccaatttgacatagagtcaggttcatttgtttcaggttgtttttgatgtttaggaatttttaacgtaaaaaatatctaaaacatttacaccgtttcaaagccaaacccatgtgataagacacctaagtcacataagtcacattcagagaagtctagggtctatctctatcttctccaccttattccctctctcccctggagatgtcatttgccttagtttttttgtttattctaccactgtttcttttttgaaaaatacatacatatagtaatatctacctttcttacacaaaagataacattttacaaacactctttccatacactgttttttgttttgtttttttgggtttttgttttgttttgttttgagatagagtctcgctgtgtcgcccaggctggagtggggtggcacgatctcggctgcctgcaacctccacctcccaggttcaagctattcttctgcctcagcctcccgagtacctgggtctacaggcacccaccaccacacccagctaattttttgtatttttagtagagacggggttttaccatattcgccaggctggtcttgaactcctgatcttgtgatctacccacctcagcctcccaaagtgctggggttacaggagtgagccgttgcgcccggccccatacactgttttttaaaggtttcccacatcagcatttactctcgaactgcagtcatgtatctaaataatcacatctgtcatcctcagaatggccttaaacccaagactccagaattgaggaaaacaatccaccagcaagagacagaattcgttaataaaccagcttaactgagatacgaaatgtcatgttttctctccacatcatacccctgacattacctactccatcccaaatagctttcaaaaattgttgctgagctcagacccagggcctttagagattgaatgtaatgacgggtccccagtggtgacaggaattgctctccgctcccagctactgaggatgggaaatggctggtgagatgacagcagtgagggctgctcacttagttcagcgatatagtaccggtgtgcaaagtgcagtgcacgtgggcagctcaggcctctggtgtgacagggcccaggagaggagtcagagtgtttgtgtcctgcttagggggctgtgtgagactccacatggaagctgttagcctggcgcagtggctcacacctgtaagcccagcactttgggaagctgaggcgggtggattacttgaggtcaggagttcgagaccagcctggccaacatggtagaaccccgtctccaccaaaaatacaaaaattagccgggtggggtggtatgcacccataatcccagctactctgggggctgaggtgggagaatcgctcgaacccgggaggcagaggttgcagtgagccaagattgcaccactgcactccagcctgggcaacagagttagtgagactccatctcaaacaaaacaaaacataacaaaacaacaacaacaacaaatacatgtgaggtcttcatataatgtgtgctcagtagtgtcacaggagaaagattttgggaactgcaagaggagtcatttatgagatacaatgatttccttgcatgtgagagaggaccagttccctgtttgttatttgtgaagagtcaggttcatctattggaaaattggcctcagcacctgcagactgagcacagattgcctgtggctgctagtgttctagagagtgctgcccagatttgtggaccaaattgatggctgtctacctgctacatttgaagcacagccacaagctccccctgccctttcacacttccttccttccagggtctgttctcttcccatccccttctatttgaggaggacacactctctgagttctttttgactacaaaagaagggcatcatcttttgaagatcaccctttaaacacactttcaccagtggggaaaggagatagagaagctttagctaaatcaagtagaaaattcagattggtgtggagaggtagaagagcacagtgtttggaaaatccctggagactgactgcatgggtttgaatcctggttctattacctccatagggatcttggtcatattattcatcttttctgtgcctcagtttctcacttgcaaactagaaaaaactggggctcttatctcataaagttgttatgtgcctgtagtgggttgaactgtggctcctgaaaaatacatccacccagaacctcagaagatgatcttctttggaataaggctctttgtagattgttttattttattctatatcctttcctttcctgtcttttttttttttttttgagtcagtcttgctctcctgaccacgctggagttcagtggtacagtcacagccccctgcagcctcaacctcccaggctgaagtgatcctccaacctcagcctcacaagttgctgggactacagacatgcatcatgtcactcagctaatttttaatttttttagagacaaggcttcacaatgttgcccaggctggtcttgaactcctgggctcaagtgatcctcccaccttgacctcccaaatgcaggtattattaagttagacaacttaaaattagattatcttgggttcaggctgggccctaaatacagtgaacagtgttcttctaagaggaaggagaaggagatttcagtctcagacccaaggagaggacaaagttagagataggagtgatgcatctataagccaaggaataccaaggattggcaacaaccacccaaatctaggaagaggcaaggattatttgtctttctctattagaacgtgagctccaatgacagcaggcctagaagggggcttgctgcctagtaggtgctcagtaaaagaagactcagcttctacattgcctctgtcaaatttccctaatcctgcctcatgctcatctctcccaacccactccctcttgtgaaccacttgggttctttgagggtcctctatgattgtatttttcctgccattgataacagtgtctttacaagtctgtctcctgaaagaccaggcatcagagaaggcaggggccaagtcttgctaactgaaggcccccagatcctaacacactgtcctaaagcaggaacagttattgagcaccatttctaacgaacgtttgggaaaacaaaaatgggaacacccagtcgtggtgggtgtagagaggtggggtcagagaaggattcccagaagagagattggagaagaatcttcaagggagataaaaggacattccgaaacagaaaaagacattccaagatctgccctaaagagtcctttgagagaaatgctactaatgactactgggctggccaacctgagcccaaaataaggtggttcagagggtaatatcactgcctgaggagcgctctgtgctctctaccagaagccaataacagtccccagcagttgcctcttcaaagcctaggtcaggaaggtggaataagaacatgcaaattgctattccagtggcagtattgcctgcaagcaatttttaagaccacacaatagaagttttcaaatagatggtttcaagtatccacagtgtaatgagatcaagactcaggactccagcatgtagcccaacaggaaaaatatcatttatggtaggctcatgaattctatttgcataaaacttctgaacctgaaaacacacactcctgatgcagtgaaaatcaagtcttctccctgtttttgttttctctggatggtggcagtctatcagacgaatcagcatttgtggtaagagatttctctaaagctacaggaggctacttttaatagattcctaaatatatgactggccgggtgcagtggctcacgcctgtaatcccagcactttgagaggctgaggtgggtggatcacctgcggtcaggagttcaagaacagcctggccaacatggcaaaaccctgtctctaccaaatatacaaaaattggccaggtgtggtggcacacacctgtagtcccagctactcgagaggctgaggcaggagaattgcttgaacctgggaggaggaggttgcagtgagctgagatcacactgcactccagcctgggcaacggagtgagactctgtcgcaaataaataaatgaataaataaatgactgaatttattcagacatttcttttattgtgttataggagataaagtctttccacttaagctgttttacagcccttaaatacctgcacacttattgatgcaccctccatactccaccttcatatccacccacccaggcacaaaacatgtatgcacacacatgcacccagtgcatctgggcatgagcacatctacggaagcctggccacggtactgcaaattttctaaagtactcattctccctgactgatctataagctcacaagggcatggccccatggttcatttagagggaaaacacacctgacagggtcaggagaacttttttcatgggtaaattgtgggagttgaattatgtgaagtttgaagtcccttccaacattttagcattctcaatttcgttttattcccccccaccacactgcctggccttacaatacagcatcaagtttagcaaagagcaggtgcaggatttattacgcaagagcctttctgtgccttcagggggcctgagcttttctgctggagctcttcaaccctggttttcattggtaccagttgccactgcatcatagagttgaataaataccaattgaattaaaaccctgattcaaatgctttggataatccccttcattagtgtttctagaggcaacgcgtcatcaaaccccctggtctgactgactaatggtgagaacttgaggcacccagcaatgaagtcaggcaatatttctggacatcagaggtggttaggaacatagaaaactgcatgactctggcagggcatgagggtgaaggggaagatgaggacgcactggggcttgtgagagagggagaggagccagggaagatggtgttagagcagagaggagcacgagggcctgaacatgggatcctcctgttccagggttacaaatgtcccctgtcccagaatggcagcgtggtttaagaatccctaacctggcaggtgacagaacaggggttgtagattccaaagcttactaaggacagtggcatagttgtgtgagaccttgcttcttctcagtgttgggaagagaagagggagtaaaagggactgtggagagggcagtccaattgtggattttaatgcatagggactcagcattgcaagatctgtaatttaatgtgaaacttgcacatttgaaataatagcagctaaatctaattgagaacagcatgcattccaaacaaaatacctcagtgggccagatttggacctccagggggatttatgcaaaagaccaagtaaacagagacacttcacagtggcggaacccaagagtctagcctggggaaagcatgcaggggccctcagataatctgtgaaagaaagacaggtcataacactcaaaatgcctacaagcgatgaaggctaagactatttgaaatcatggaaaaaggttagcttcttcaggaaaattgtatggtcaaggtacagggacacatgtcatcctgggatatatatgactgtggtggagactggtataacatgagccactcagggaaaaaaacaaaacaaaacaaacaaaaaaactcccttcctagtaatacataaagctaaagagaaattgcatctgggttacaccagaagaaggaaatgaggtaagaaaaaggtgagaataaatcacctaatcaaaatactgggttataaaaataactagcccacctgcttcaggactgtaagaaactgagcaatgctttcaggaggccaggttgaaaaacacaaacctgtttagccacagcttgattccatgcaattcatgctccaagattctgtctcactgtggttaaaaactcatgttttttaaatggtgggctgacaaaattgcattattgtagatgtggaaggaataatataaatgaagtagcattggagaatcaatatttttggagcaccatcatgtgcctgaccctgtatgggtgactcatgtatgataaccgcttttactgctcacatcattcttatgagatagatacttcttttcattcctgttttgcaaatgaggaaattaaggcacatactggtaacatgacttacctaatgttagagctctaataataagttaaagaactgggatttaaaccagttaaatataataatgataataacagtaaacaattcgatcctcagaagtctttgtgtgagctctgagctctgatttccattattaacgccagcctgtctttcgagggttgtgaagattaaatgagatagtgcctgtaagaacttaacactgacttgcccaatcaacaagattaatagttgttattaataatagtaactggatccagtattcagaaggctctactgggaggaagtatagggacaaatagcaatggagaagtgactgggaggaagaaagaggtaaccggtatagacttccctttggaaaatttcaggtttgaagtttgtttttaagaaagcttatttaccggccgggcgcggtggctcacgcctgtaatcccagcactttgggaggccgaggcgggcggatcacaaggtcaggagatcgagaccatcccggctaaaacggtgaaaccccgtctctactaaaactacaaaaaatagccgggcgtagtggcgggcgcctgtagtcctagctacttgggaggctgaggcaggagaatggcgtgaacccgggaggcggagcttgcagtgagccgagatcccgccactgcactccagcctgggcgacagagcgagactccgtctcaaaaaaaaaaaaaaaaaaaaaaaaaagaaagcttatttaccatgactgctatggactgaattgtgtctcccttccctcccccaaatcaacaaattcatagcctgaagccctcatcctcaatgtgatgatattagaaggcagggcttttgggaggtgatgaggatggagcctttgggattgaattagtgccctaataaaaacagactcaggagagctctctctctctccctgccatgtgaggatataatgagaaggcaattatctgcaagctgggatgtgggccctcaccagacaccaaatctgttcgcaccttgacattggacttcccagcctccagaactgtgagaaataaatgtctgttgtttaagccactcattctatggtattttgttgtagcagctcaagctaagacagtggctgcaagtggaagaggaaagcctgatggtgccaatggtaaggggtttcaggtgagtgaagaccaacccctgggccatggagggagggcatccagagcccagatgagaaattcagccctggaaaggggtgaggacaactgttccctgaaacagaggaaagaagagaagaatggatggaaaacactgggagattttgatgtggaaggaagaaaattgagggactgtgaatttgacctaatccaaatggaagggacaaaattttgctgatgaaaatggaaggtgaggtgccgggggtagaggaaactaggaaagggggcgcctagcttccatgggggttcaggaccatgttttttaattataaatttaaaaggcacgtatcagttccaccaagacatctggtcccagaaagcattagtgtctccttcatcatttcccatagacaagttattatctttcttggaggattcatctcaggaatgaattggcattgttgaaataggttgaatagggctctgttttggggatgggagtgaggggaaggaacctaactcaacagtccatcaaagcttcacactggaatagggccatttcattgagccatctccctttcctttaaagttaatggaaggaccattttttccataaacttagtacttttttgtgtcatttccaagccactgatagcctatctaaattgatactccttttgtttgagtaagtttttaaactaaggttcagtgcatggcatagacttggagaactggattattcacagaaaaatcagtgaagctggtgatatatcatgaactagaggtattttttattctcagagatatagcaaaattcaggatgatttcatatgtacttgaatcagtgattattttttgcattaagcatatagtgctaaatgggaatatagataaatatttaaatattcccatgtcctcaaccctcctagtgggaattgaaaaaaaaaaaaaaggcaggataaagttattgtactactattgtatagttcttttctcccaagaaattctaagagttatgccaataatgcaacttgtcctggacaaggtgaagtgatgcccaaagtgtctcaatttaataaaagggaaaactgaggccagaagaggtacatgcccagcttgtcaaatatcatgcacagaaaagccatactataggctcagattttctgacttccatcctgcagcttctgttttgtttattcatttacacccacgtcattcactcacttattattcattcagtggatacaatggacaaagcagtaaaaggagctataaagaataccaaagaaatagaaaataatttttggagttaaggatcataatctagctgaagagataaaaccaacacagtaaaaacaaaacacaataaagcaaaaccaaaatgacaacgtgcctggtactctggttggaaaagtactttaaaaattcagagtccactacagtgtgaagcctgcctgttaaggttttgcaaagaaggcagaacttgatgtcacaagtgacaagtttttttgcgatgggtgcggcaaggtgggggtggtggcagggtaagtcttttcaaagagaaagctatggtctgaatatctgtccccactatgattcatatgttgaaatcctaaccccaggcactgatattaggaggtggggcctttgggaggtgattaggttatgggagattagtggccttataaaagagaccccaggccaggcacagtggctcacacctttaatcccagtactttgggaggccgaggtgggcagatcacctgaggtcaggagttcgagaccagcctggccaacatggtgaaaccctgtctctactaaaaatacaaaaatcagccaggcgtggtggtacacacctgtaatcccaggtacccaggaggctgaggcaggagaatcactagaacccaggaggtggaggttgcagtgagccgagatcatgctactacactccagcctgggtgacagagcaagactctgtctcatgaaataaaaaaaaaaaaagagaccccagacagatccttcattcctcctgccacacatgagattacaaggagaaaatacctgtttatgaggaatgggctctcaccagacactgaatcctctggctccttgatattgaacttcccagtctctagaactttgagaaataaatttctgtagtttataagccacccagtctatggtattttgttatagcattctgaatggactagagagaggaaaagcataagcaaaatagtaggaaggcagaaatgaatatagtttatttgaaaaatagtcgggttgttttgaaatgaacatttcttttggaaaagaagaaggtgaaagcaaggaaaaaaggccaaaagaagaaaagaaaacctacaaggggaaaggagatgagggtctgttgcatatgcaatcgattggcattcagaatctatttcccttgcccctggtatatgtatgtactgcagaagctagatagcaaaaaaagacattttctcagcccccttgaagtagagattgtggatgttaattaggttccaccagccaggccagcttccaggcatgtaacctgtgttgcaaaggatcccttgctcagaagggccccaggtttgttttaatgctctgctgctgcagtcttgaaatcctgaataattttagctttgaattcatgttttgtaagtgaagtccaatggaacaatggagcatgagcagaggagatatatgcaagatgggtgtccactgtggtcccttgctgccccgttcccacacagcttcaggagtgcccccgagcacagaatctggtggacctaagacgcatgagagttcagccaggctcaaaaccagcacagagtaagtgtatcagagaaacaactgagtctgcaggctgctgagggccatgaaaggccacgctctccatttgagacagtatttacttggaacacaaaaaggtgaaggtattctaagaaacatgaaccaccgaggtacccttatcacatgttttcctacttgtgtatttcttacctctctgtattaggcaaccacttatgctgaaaataaagacatagaaggaaaggaatagatgggacaacacataattccttttcctttctgtctttccttattcataagcaaagccaaaggtagagaacattaatggaatatcagcatatccagaaataaaatacaaacagctgagtttgttttatgcagtgtttttgctgttctggttaagaacagaatatctaagtatgtctacaagctaccaggtacaaatcgtgtgcttttggtgattctacatataagtgaaatgcgattatatttgcttctgtaactggtattgtacaatgtaaaaatgaaggttaaaattcatactaataattttaatgtttaatttttccctccttagaaaaacattaataccaactaaaaaaacaccatgacaagagaaataccacagaaagaaggaaaaagctttctattttagtacgtttagtggcacttttttcctcctttgtgagcaaggtgccccacaaattatgtagcaaacaaaccctgttcacaagtttgcttcccatgtgtgagatctggaaggcaacaatagtgtggacacaaccttccttcctacccactacctgcatcaaggtcattgccactgcctgaggccagccatgtttcatgatttaagacactttcatcacaagatgaaaacaatgtgaatcccaaactaatgtttaaattagttttggggttcttttacttatcccaaagctaattcagggttttcagaatgatatcatatttaaattaattttaatttttattcaggtaatacttttgtataatttcacatttcaaatagcatatgatttttaaaatttagatataattcgcaaaccctaaaattcagcttttcaaagtataaaatttagtagtttttagtatactcacaaagtgatgcaaccatcaccaccattctaattacaaatattttcatcatcccaaaaaagaaaccgtgtaccttattggcagtcataccccatttcccctctcccaagcccctgtcaattactaatctattttctgtctctgtggatttgtttattctgaatattttgtacaaatggaatcatacgatatgagatcttttgtgtctggcttctttcacttagcacaatgttttcaagattcattcttgttctaacaggtatcaatacatcattcctttttatggttaatattccattgtatagatatgccacattttgtttatccattcatccactgaagtatataaagttttgtgttttgtgattttgtgggttttgtttgtttgttttttgagacaaggtctcattctgttatcctggttggcgagcagtagtgcaatcgtggttcactgtagcctccactccccaggtcaggccattctcctgcttcagccttcagagtagccgggactaaagtcacacaccactgggcttagctaattttgaaaaaattttttatagagacagaatcctgctaagttgcccaggttggtctcaaacccctgggctcaagttatctcccccacccctaccccacttcagacgcccaaggtgctaggattataggcatgagccaccgcacctggcctgcagtccataaagttttaatgaaataagagtagtcggtcaggtgcagtggctcacgtctataatctcaggactttgggaggccgaggcaggtggatcacctgaggtcaagagttcaagaccagcctggccaacatggcgaaaccctgtctctactaaaaatacaaaaaaaaaaaaaaaaaattagccagacatggaggcaggtgcctgtaatcccagctattcaggaggctgaggcaggagaatcgcttgaacctgggagggggaggttgcagtgagccaagattgcgtcactgcactccagcctggatgacaagagcaaaaactccgtctcaaaaaaaaaaaaaaagagtagtcacttgctccattctttcctacttttcctactccccaaaggaagccactttctagtcttttggttatttttcctggtatttacctgcgtttctatatatcatctttatactcctatttatttataatttatatatgtatttattatattcttactttgagagatgatcatgcatcatttttatacctcttcacatacttattctttcttcttcctttctcttaatagttacctggacaattttcggttgaattactatttagcagttagattactgtgaccatgccaaagaatagtcactgctgagccaagaattatatccctgttacttttgcttttctgaactgggagaatcacctctcttcctgatctctcatggggaaatgccacagggcccaggactttggctgctgctttcctctgtctacactccctccatagccatcctcatggcttaaatagtaatcatgtgcttatgactcctaaattcatactgccagcctggtcttcacctgaattccagtctctctctttctttcttttctttttctctttctttctttctttctttctttctttctttctttctttctttctttctttctttctttctttctttccttctttctttccttctttgaaatagagtttctctcttgtttcccaggctggagtgcaatggcgaggccttggctcactgcaacctccgcctcccgggttgaagcgattcacctgcctcagcctcccaagtagcctggattacaggcacccgccaccacgcccggctaatttttgtatttttagtagagagggtgtttcaccatgttggccaggctggtctcaaactcatgacctcaggtgatctgcccgccttggcttcccaaagtgctggggttacaggtgtgagtcactgcaccaggcctgaattccggtcttgagttgttttgcccaaagctgacttgacatttgctcttggatgtctaacaggcaccacgtacttaaattgtccaaaacagacccatttcccctcctggtgagccacaaccttcaccatctcagtaaatggcactgctatttttccagttggttcatccccaagccttgaaaagatccctttcttgtttttcctttcgtaccctatatccaatccacagaaaattctgctaactctattatcaaaatatatccaaaatccaaccacttctcaccatctctactagtaccttcccaaagccagaacagcagcatcatccctcacggttgttactgcaataatctcctgatgggtctccctcctgccttcctggccccctgcagttttagacatcagtcattttcacatcacccctatagccaaatctccccagtgatttcctatgtcactcagataaaaggtggtgtaagatctggctctgctatctttgacctcatctccttccactctcgccttcctcactctgttccagcagcactggcttcctcgacatacttggaactttctaagttcattccaagctcagggcctttccccttgccattcctgcctcctggaatgctttgctcccaaatagcagcatgacttgctccctttcttctcaaaagtcctactggctcaaatgtcacttcattggagtggttgtccctgatcagcttgtataaatcaacaccctactatgactctctctatgcctcttatcctgctttatttctccccatgatatctatcaccccctgacacattacttatttatttattgtctgctttcttcctgtggaaggcagggatgttgtctgttgtgtgtgctatcatatctctagtgtctagaatgtgcctggaatacagtaagcactcaacaaatatttgatgagtaaatgaattaataggaagtgtcaataaatgcatgtattcaatctacaagttgaatttagaagcagagtttcatattctgcattaaattccatgtagcttctccttataaatgcatccttagtcagtaggactccgtgtttaagtatctttctctccactagaatgaagcttttcagaggaattctcagtgcctgcctcagaggctaccctcaataaaatgtttgcgggactgtgccaccttagagagctaaagaattaatggacataactgctcattagagtcacatgttgcccatccctaaaatatgtttaggagtgaatgtaatacatcaaagaaagatgattccaaaacctcattcatccattcattcatccattcaacagttattgatcacatatgtattaagtaccttctctgtgaagtttctagttcctaaacactttctattcttgtgtctaaattaccactcaattctccccctcctagtgatctaaagcattgtttctggttctgacctcagtggagctggggaacagctggataccagcatctacctaatcacccttcatcccttggcaactgttaagacatgccaggatgctctttgctgatgcctctcaaatttaaaatgggaacactgggtattcaatatagaggccttgacatttaaaatacctgacccttctttctcagcctgagagaaatgcctggttgttgacattcagggtccagcacaggccagccatccttccttggggctggtgtttggtttggtgggttgagttcacagacaatgagcacattttcctaagtcatcaaagcaggaggaacccacatccttggaagtaatttatggtagcatgataaaagaggagtaatattttatatgaaaattgaattcttttttttctttttctttttctttttttttttttttgagatggagtctcactctgtcacccaggctggagtgcagtgatgcaatctccactcactgcaagctccacctcccaggttcaagcaattctcgtgcctcagcctccctactagctgggactacaggtgcctcccacgatacttggctaatttttttgtatttttagtagagacggggtttcgccatgttgcccaggctgatctccaactcctggcttcaagtgatccacccaccttagcctcccaaagtgctgggattacaggcgtgagctaccgcaccagcactggaacttgaattctattcagctggtatagaactatcttattttattttatttattttttctttttttttttttttgagacggagtctcactctgttgcccaggctggagcatggcgacgtgatctcggctcactgaaacctccgcctcccgggttcaagcaattctcctcccttagcctcccgagtagctggtattacaggcatgcgccaccacgtcaggctaatttttttgtatttttagtaaagatggggtttcaccatgttggtcaggctggtctcgaattcctgaccttaaatgatccacccgcctcggcctcccaaagtgctggtattacaggcacaagtcaccactcctggacaaatggagcaattttaaaatgtggggaaagaaattaggccaaattggaaacaaagctcccaagtcatataggagtgctgttttgttgtcaggactttgcaatttctctacagagtccctggctccttgcacattcttccagacttcttgctttggttggaatgaaaaggcgtccttggaatgagtttcctgaaactcttctcactgtgttacgtaaacaaaccagttttataagaaaagtgccatgggagccttttccaggataggtcagaggtcaagcaaggaggacaattaacaataatattttgcaacatttattcactgtttttgttagcatcattttaaaaagctgagcacttgcaggttaaagatatgtttccttcaagaaaacaagaggcaaaagtttgttctttagaaatttttttttaaaaaccctcagagactaactcttttaactcaaggaggaaatctgaaaaagcaagttcccctgttgtacttgagtgttcagtttgcacatacgggtttacatacacacactctctcacacaatttgatttatacccggctttttgtttgttttttttcctctggttcaaaggtattgtgtaaaaggaagctatagccattgatttgcctgtgggacattagtaggggaaatgggctcatctgcctggaagggtgagcggggatttcaggatatagaactgactgggacctgattcctatcagatacatttgcccgtgaaatgacccattcagctgtaatgaggtagagttattgccggtggccagattgttgggagatctccctggagccgctcagggacctgcgggtgaggtgggtgaggtgagcattggatgggttccccacacagctcctgggttaaactggagtcttttgttttcctctgggaagttggctcaagccttcggaaccttgcatgtggccagttcccctgccaagtgactcgtccttgggaaggaatgggctgtaaacacagggacagcccaggtaggacacatggtttgtaatttttaactaacactgtgtttctcccgatatgcccagcctttcttcagaatcattctttccttttgacctctttctactaggagtgactgtctttttctctctttaaagtattttcaaaatcctgtgttctttatcctagctttccaagttttacactgttccccattgtttcagggaagaacactctcaaactgcgtttttcctctgctctcaaaccacaacagaagacttctgtgaccaaagatgtgggggtttttccccacgcaccaagcaacagagatggcttggtggcctccaattcagttccgacactatctacccagagataatgtcagatcccacaggttgagcgctcagtcccacaagacctgttcccccaatccccagtctcaagtccaagcctccagcacttctgactcagtggcttcaggttggggttcccacaaccccctcttcaggtttgattaatttgctagagcggctcacagaactcagggaaacacttacttatgtttaccagtttcgtaagaagaatattttattttattttatttttttaagagatggaggtctcacgatgttgcccaggctggtcttgaactcctggcctcaagagatcccctccatctcagcctcccacagtgctgggattacaagcatgagccactgcacccagccctagaaggatatttttaaaagtacaaataaacaggcagacaaagaggtacatcggggaggactggaagggtgctaggcacaggagctcctgtcctcatgaatttggggcgttccaccttcctgggtgcatgagttctgctatgccttcctgtcagcctccatgtattcagctctccagaagctccccaaagcctgtcctttgggccttttatggagacttcatcagttgtctgtgatggaagcatggacaaatgtgaggaaatgagattgggcaaaaagagtgtgatctaaacccagcaagacctgtctgttcagattcttcttagcctctctgtgcagaatttcttcctccagattacggggcaggaccctctttagaatgagggtcataggacccacaattaggttagagtcctgccttgggcaggtgaaaggaggataggagaaggtcagagagaggtattttgtttcctgagccctgaagtgcccccaacattataacaaaagactgtaacaatggctatgagagttaggagctagcaaccatggacaaaaaatgatatttattaatataatcataatatcccatccatcctacccaccagttccagatcagaatgttccacccgccttgtgccctcaatttctatttgaatcacatttcctcttagcaagaatgcaagcaggttggggatcttttggactgagccctccaaagaccatgagcagtcaggtcacccattgatacctaactagacaagcactgtttttgatgcagataaataataaagaaaagaaaagcagcacatcttagggagttaagcaacagaaacaggtgactgcaaattcctttcttaactctaccatcaactccctgtgtgaccttgagtttttaagacttatcaggaatatagagaacctcagataacttcctagggctattttgaacaatacatattaattaattggttaaataatgcagtgattacaaatcattttgtatatgcagagctttcactaagtaattctgcatgacttactaaatgactgaactaaaagcaatggagtgaagttcacattgtttttttcgctatataatgaaagctaacaaatattaaatgtttattatataccaggtgcttagcttagatgatctcgtttaatttttcccaacagccctaagttgtcaatacttttgtttttcccattttagagacgaggacactgaggcacaaagaagttaaataacttccaaaagtcttgcagccaaaaggagccagaacgaggatgtagactgtcatagttcatttttaaagttgatgcttttactcattctgccataatgctcacatacgtctgtaagtctctcaaaccattgcaggaaagttttgacaattctttctttaaaacattcagtcccatggatgaaataatgaataactagcacttattgaacaattactatgtacaactgcacatattaaaccatttaattttgacattaaccctatgaagttggcatcgatattattcccactttaaagatgaggcacagagatgttaagaaacttgtccaagttcccacagctagcaagtggcagaggccagctttgaaccctgggctgtctgggttctgagttcatgctctttatcaagaaatatgcccaataaatgactgaaagtgtagggcagcatgtagaatgctgttatggactcaaggagtagacttggccactaaactaactgtgtgaccttaggcttgagtttcttcatctgaaaaatagatgttctccctgaccctgccagctttataattctgtaatttaacatgtgtgaatttctttatcttttcttctttctttctttttttttttttttcttcaaggtctgactctaattgcccaggctggactgcagtggcacaattttggctcactgcaaactctgcctcccagggtcaagtgatcctcccacctcagcctcctgagtagctgggattaggagtgtgcataacatatccagctaatttttctattttttgtagagatggggttttgccaagttgcccaggctagtcctgaattcctgaactcaagcaatccatcctccttggtctcccaaagtgttgggattacaggcgtgagccaccacacccagacatgtctgcatttagtaataagagtccagagacaaccattgcagtttcagaaacaaatgggtagaaaagatcggttttaggaatttgaaaagaggcaggaaggatacacaggtttggagtttcattcaggagccctgggatgccggaatccagaagtgctagggagacttcaaggagatgaagctacttggcaagagaacagcatcttgattccagcaggagagacagctgatgtggcttatggagatatgaacagaggggccccacaggattcatctggagcagaggtgccaatggagaggaaggggggaagaagtgcagtgtagtagacaactctggcattgtgttttgtgaactgggtcctgatattggggaaagagtagccacaaatccattattcttaaaattcaaggttttatttatttttattttattttactttattttgttttattttattttatttttgagacaaagtcttgctctgtttcccaggctggcatgcagtggtgctaaccctaatcccactccaggttcaagcagttctcctgcctcagcctcccgagtagctgggattacaggtgcacaccacgacgcctggctaatttttgtatttttagtagagacaggtttcactattttggccagactgctctcgaactcctgacctcaggtgatccaccagccttggcctcccaaagtgctgggattacaggcatgagccaccaagcctggcctaaaattcaagttttatggtcaaggcagcatataaagagcacccctaagggctttgcggtgggagagacatggtttgttccctcctccaccactttttagcctgggatcctgagaaagtgccttaatattctccttggtaaaataaggatcatacagacactgaagagggactcagtaaatgctattttccatcccaacgggccaggacggcttctacccaaccccaccgtaaacctaagaaaatcaaaacccaactaactcctagcagtcaggaaaatctttgaccttgaagaggaatgaagatgtcatgtttactcctgttgctcctctcaagttgctgtagatttctcagagagcttagccctgatcttggagaggcagggatgggagtacagtgataggcagcaaaacaagcaacccaaaattaaaagagatgaacttgctccctatggtaagtacgggagggttctaacaacatcggaacaggggtttcccttcctcagtcctgtttcctcaccgccatcccaggtagagtcagctaggcagatgctggccaatggctgacccacttcaaagggctgttcagagaatgatatttgcttatacagcttctcagggtcccccaaatggaagaaacatcaggcttaacgtcactccagggcaaaagtggggagatgagagtgtcacatacatagatgcacgaggacaagagggagagagtggaaaaagccgacctacattagcttcctatggttgctacaacaaattaccacagacagtggcttgagacaacataaatttattatctcacggctcttgaggtcagaaagctaaaatgggttagcagggcaccactccttctagaggctctagcgggtaactcgtttctttgccttttccagctattagaggctgcctgtgttccttgactatggttttaaatcattcctacctctacttcctcttcacacctctgactctgactcttctgtttctctcttgcaagaagccttgtgattcccttgggtccatctgggtaatccaagatgtctccctatctcaagatactgaattaaatcacatctgcaaactcgcttttgccatgtgaagttaacatgttcacagattctggggattaggatgcagacatcttcagggtaccattattcaggctaccacactacctaaattttggtatccaaaaatttggttcatctccctattaatttgtgacctcaaacaagtcacttctctctaaccttgccatctatatcagtagcagtattttacttgatttctttactttgagggtttatggggtaatccatataaaatgtctaccactgagccttgcatggtgtaagtgctagttcccctctcccttctctaccacatgagttaacattgtggagatgatggttgggaaagggcactgggactcttgccagctgtcgcaggctgaattcctgagaaaattgactttgcaatggagatatgcatgcagaaagtatattaaggcatggtcttaaggtggacacctgtacggggtgtgaaagaagcaggacttggcagagggagaagctgggctgccatgaaaaggcaacagaggcccatggggaactcagagttgactcaaattaggacaaggggccaggcttttacatccctccatgaactagtcattatatgtgagttgcccagagagggccatgacattggccaagctggctctctcccatggagacaatcctgggggggagggactcatccgtgacctacacttccagcagctgggggaatgcatgccccagtcatgcagcaaagacctggagaatgtcccatagcatccactacagcagctaaccctcttggctcattaagtgaagaccagagagaaaacagaaggtaagtgtcctagcaaggctatatacctcagaggttcaggggttttgctcccaagcaggtaagcctgaattcaaatcccttcttcccattgtatgatttgggacatgccctttaacatctttgtgtctcagcttcctcatctctaatttagaggatttatctcataattattgtaaggattaaaaggatagtcaatgtctctgcaaccatggacagttggtcccatacatgttagattttgtggttaatagcattctcagaaccccttgcctacttgtcctttttggctcaaatctagatgtttaaaataggggctggaaagaaaaaagaagactcctacaagaacactcatcatgatttaagacatgtttcagtaaagacagggatcgggggttggagggtgggaagagggggtgttaatgagaggtgacagcgtgctggcagccctcgcagccctccctcactctcggcacctcctctgcctgggctcccactttggcggcacttgaggagcccttcagcccactgctgcactgtgggagctcctttctgggctggccaaggttggagccggctccctcagcttgcagtgaggcgtggagggagaggcgagagcgggaaccagggctgccggcagcacttgcgggccagctggagttccgggtgggcgtgggcttggcgggccccgcacacggagcgaccggctggccctgctggctccgggtaatgaggggcttagcacccgggccagtggctgtggagggtgtgctgggtcccccagcagtgccggcccaccggcgctgcactcgatttctcgcggggccttagctgcctccccacggggcagggctccggacccgcagcctgccatgcccgagcctccctccgccccttgggctcctgtgtggcccaagcctcccccacgagcgctgacccctgctccacggctcccagtcccattgaccacccaagggctgaggagtgcaggtgcacagcgcgggactggcagacagctccacctgcagccccagtgcgggatccactgggtgaagccaggtgggttcctgagtctggtggggacgtggagaacttttgtgtctagctcagggattgtacacgcaccaatcagcaccctgtcaaaacggaccaatcagctctctgtaaaatggaccaattggctctctgtaaaatggaccaatcagcaggatgtgggtgaggccagataagagaataaaagcagggtgcctcaggtagaagtggcaatctgctcggtcgtcttccacgctgtggatgctttgttctttcactctttgcaataaatgttgctgctgctcactctttgggtccacactgcctttgtgagctgtaacactcacctcgaaggtctgcagtttcacttctgaagctagtgagaccacgaacccaccaggaggaacgaacaactccagacgcaccgccttaagagctgtaacactcaccgcgaaggtctgcagcttcactcctgagccagcaagaccacaaacccaccagaaggaagaaactccgaacacatccgaacatcagaaggaacaaactccagtcacgtgtcctttaagaactgtaacactcaccgccagggtccacggcttcattgttgaagtcagtgagactaagaacccaccaattccggacgcattaagagcacacaatctggagccaagccgtctagttgagattcccagatgtgccactaactagctggatgaccttgcaggtcattgtgagaactaaataagagaaagcaagtaaatctcataagacactgcccgacacatactaggtgccatatgtgttataatagtattcttgaactacagtataatccacaaaggcaacattgagggaagattccaacctcaaagattctccaagaagtttaaaacactgtagatacacaaaacggattcctaaagttggctacagaccctctgtttcatctgttaccaggttaatccttcgctagcaccaattctttggattatgtatttaatcatttacagttacaacagaatggtcaaagaggatgatgttttctatagtttcagggggcattaagtggagaaaagaggttcaggaaaaatgattctagggatcagctaaaagaatatgtattccttgagaatcctgcctgcccccacccccataaaggtaaaatagagtaaaggtaaaaaaaggtaaaagagtgtggtaaggtaggctgaagtctccatgcattatatgatcttttcataattgttttttcctacatgaaaaattaaaacttgtaggctgggtgcactggcttaatgcctgtaatcccagcactttgggaggccaaggcaggtggatcacctgaggtcaggagtttgagaccagcctggctaacatggagaaaccccgtctctactaaaaatacaaaaattagctaggtgtggtggcgcacgcctgtagtcccagctacttgggaggctgaggtgggagaattgcttgaacccaggaggcagaggttgaagtgagctgagattgtgccactgcactccagcctgggcaacagagcgagactccacctcaaaaaataaaaaaaaaataaaaatgaaaacttgaggaacttcaaacacccttgcaattctgccatttgcccccattttcgctgtctccaatttctttttcctcaatccatccttgcctggcatacccatgctggatggggctgcagaagatatgaattatcagaaaaaaagctggacctatactactggaattgagagacacagaacatggatttaagagaacactctcctcacagatggtccaggctccaagctgagagcacttgccctagcctctctcctcatcttgcccctcgttctgcaacaggttgaaaaaaaaaatcagatgtttactctgattttacttttcacatgctcttgattttcaagcccagcttctttgggatactgctccactaggcccaggctggctttgtggacgtgctactccacagagtgaaaaaatacaagtcacaggaatcccaagtcacatagcaagtcagttttttgggactcatttaaactccgttcaagattaacttttcattagttttatttggttaaatgttgctgtaaagtttcttctgcaactatggtatcagattattttttatttttttttttagcaagtaagcagtaaagtgcatgcactaagtattttcataaaaggggaaactatgctgtttctatcttttataatctaactccttgtgatgcatgatttgggcattaagggagctatttagcagacaggatcacacccctgactttcatctttgtggacttaaaatcagtgaaagttcacagagatgtttttattaggctgcggtgaacagttcatttcctgcactgacttttcatatcagaagacatagttaactttaaatcttgtgatttttatttcctagaaaaagtcaagaacagcctaacaaagagtcatgggacttgcggaaaaagcccctaaacaaactacatctgacatctaggcccttctcactatctgcaatgtcaccatcctagggcagtcagccatacctcttcctgaggtcactacttacgatggcctcctcattgctctctctgtgtcagtgagcctgattcctgtgtgccttctgcacacaaaacagccaggaggatttttcaaaaagtgtgaattatatcaagtcattccccaactaaaattctataggaacttcccttgtgcttagggtaaacctgaagttcttactgtggacatatgtctgtatgtggtatggctcctgcttgtctctccaggctcagtccactatcttatagccccactggatttcaagttcttgagtagctctttcaggcctcaggaccttcacgcatgctgctctatttagaaactttctctccatcccatccctttcttccaagtgactttgtccttattcttgagacttcagcttaaataacattttcccagggagaacttccctgactatcctatttcaactagacttctcactcttgtcattagtctattttagactttttcagagcatttatcatgattgtcatcatttttatttttctttttttctgattcctgtggttgaatgtagagagccaagatcatgattttgtctttttcatttgtatcctttttgtgtaggaagccatttggcacaaatttagggactcaccaaataattgttgaataaagaaacactttattctgatagagaaaacggctgccttttccaagaagtagccttctttttatttatttatttaatttttattcttggtttttttgttgttgttgtttttggagataaggtcgtgctctgttgcccaggctggagtgtaatggtgcaatcataactcattgcagcctcaaactcctgggctcaagcaatcctcctgcctcagcctcccaagaagctaggactgcaggtgcgtgccaccatgcccacctatttttaaaaattattttgtacagacagggtcttgctgtgttaccctagctggtcttgaacttctcacctcaaaaaatcctcctgccttgacctccctaagtgatgggattacgggtatgaaccatcaagccttgcctgcctttaaagctttaattttattaaactctatatgacattctgaagtgtcaaaatagtctagttataacattttttgagatttttcccatccaattccttatgttttgtggtcttgtctattgtgaattctatgaatatgaatgtaagcttcattttatttgccatatctccagtatctataacagtgcttggcatatagtaggtattatatatgtactgatgctacacaaaagctatccaggatgaaatttctgaattgatttagcactaggaccacaaactcacagagcagtgattctgagaaagtttgcaaactggtagcctatcggctagcagtgtcccagaaaattgttattatttgacctggttaatattttaacttgtattcaatcagttgccaatatattagaattgggagatttcatataaaaatcctgatgtaacttttcttaaaaagccacaaatctggccatatggggccctctttgccacttgccacaatgggctcaagctgccccttttgggggtgcatctcctctccatttgcattttctattcatttgtgttgatgaaagaatcataccccattacaatcatcctgaaaataatagtgggggattttaaaactaggtaaatatagaattccaacagaaaattcatcagaaatgaagaactaactcagggaatatttgtgcaagactgagatggcgtcaggcctgatcagttcttcagagatttgttcaaagctctctgcaagcgttgcagtaggtagtggctggaatagaaattctttacccttgagatcttctctcttgttaaattctgggcatggagtaagaagttaaatcattttcttcctctcaggaccaaactaacttggctcatagttattcaaggataccacacccctaacttccaaagaaaggaggaaacaatataaaggcaatattcaaatctactcctgggtcacatactttgaaagttggcaaacaactagtgccttgacgagtcaaagtgcacattccatcaattgagggtgagttagcaggagcgcagcatcgccttcatcaccatcaccatcattatcatcattttggaaatctgagttttaatatggacctttggaaacaagttgctataaagggggtgaagttaacatttgatcagaaaatactttggccatgtggacaatagggtcaaaataagaaatgatctatgagaactggcgatgagttattggctcaagtaaatttagactgacatcaaaatgataattaagtttatgataattttgcttttagaatttgattttttgcttccatttactggttttggtcattacggaaaaaaaaataggcctgatgagggtaaaaacatccagtattgctgaatttgatttggtctagcaattagatgcatttttataagtgctactaattgtcccttaaaataaactggaatgtcacagtctaaaattactcatctattttgaaatctaatttattgcttccacttaaatgtttacagattatagtaaaaaataagaactatcaaaattataaaatgtttaagtataactttgaggaatttatcattcatgatttaattaagcagttttttgcagctgtacatattcattcctgggtaaaaatatcttgctccagcagtactattgaaaatcagaattttttctacaagaagatttgctcttttttttttccttaaaaatgtaagaaaacaagaatttaggaaattagaaaagaattatttttaaatgtggaaaaaattaacatgtagtcactcactggaatagtagcactgctccatataacggaccgctaccttggattgtgattaatctgcaatttctggtccacctgggcccttaggatagagcagctgagcttcagaatcactgatggagttaattaaaagcatacatgtccctggagcttctaattccttcattctaggctgaaacctgaaaatctgtatttttgtcaggtgtatctgagggtcacccatattaggcaagtactaggctagttccagaggatttagagacactagagggacctgaaatggatttgtcatcttgttcttcaaactcacgtgagcctgaaacccatgatctgaaccagacaagagccccccagtctgatttggtccttatattccattaatctcagattcaaatgcttaatctgagttgaatgatttcaggggattggcaatcagaagacttggttctaggcatctttttgcttctaactggcgatatgaagtcaatctttttttggcattaccatcttgtaactgttacagttttgttgcccaacgcgcagtggttcaacataccaaggaaccaggggttgcagcagagaaagagtttaatcatctcatagggcagcaaaatgaggagatgggaggaaacctcaaatccacctccctgagagactggggtatgaagtttttaagggatctggatgtgtaatgggctaaagtgtgaggattgctgattggtcacaaagtaagaggtgaaactgtggaacagagagataaagaatctgcattcttatgctgagtcccttggcagggtcttcagataggttggcgtttgctggaattcataatctgaaaagtaattttggggaaaaaggtccagtccgagattccatctataggagcaatgaaggaccaggtggtcagcgagctacctgactgttgattagttagcagctgcaagaaagtgggtcgaagtgcaccagcacagcctcatcaatgcctgactaaatctgcctaaagcctggattgtaattctcattaaccctgcgagggcagtttcaatctgtaaaataaagaaggtgggataaatggtccctatgaaaaggattacaaagcagtggtcccagggcatatccaacctgcagactaattctacttgggcctacatggtctttgaaaatgaatttcagttatgttccaaatagggatatccaaccctctaaaaatctggattttcagattctcttggaaaattgaaaattctgggcaatactgggtctcctgttcctatcttgtaactctgctgggtagagtagtgtttgttcctttgaaataggccatgtgttcttatattccaacagtagcttccgctcctccccagcagcctgctcatccttttatgtttcctgctcagcgcctggagctgctggagctgttgactcgcccctaggtcattttcagggttaaggtttctggattctccagtttacatctaagagctgggtcctttaaccaggcctggcctgattggcaccctccttaatttttgagtctgaaaagcaatttttgctgtttctttttcaggatacagtgagtctttaaagaagaggtggccctgcgtgcttgctcacacctgtaatcccagcactctgggaggcccgggtgggcggatcatgaggtcaagagattgagaccatcctggcctacatggtggagccctgtctctactgaaaatacaaaaattagctgggtgtggtgcgacgcgcctgtagtcccagctactcaggaggctgaggcaggagaattgcttgaaccctggaggcggaggttgcagtgagccgagatcgtgccacggcactccagcctggtgacagagcgagactccgtctcaaaaaaaaaaaaggtgggggtggtgggcaagagagtagaagactgaaggaatgtggttgctgctttttcagaaatgatccaaagaaactagaaaacttctatgtttacaaattcctaagtacaatatacccaagtggatcttatttaggccaaatgtttgtaccatgggttatgtgaagttctagcaagagcaaagagattacttaattgccaggattttaatgacaattgtacggcactgagtctaaaatctttgtaccaatataataattgctggatgactagaattactgaaaggaagtggcttttctaggaaaacaaacagtgggaaattttttttagctttttcagaagcatcttaagcctaaaggtggggaagttagggttgagagatacgtgtttgagatgctgtggaactgatatagacctgcttgtgaattaatcagatctgacagttatcaaagggactgacttatcaggatgtgcccttcacaccacttccacttaaactcaaaatatgccaaatgcagagtgggtagagcagatattcttagcttccctaaggcaaagtggtctcaaaagtacacttcctgtgatctcttacctcaattcaaatcaagcatccctggtccccagtaatgggcatgattctacattacaaaagatggacacaatttgagcccagagctagtgtatgttacagatatctatgcatgtgacaatttttttttttttttttttttttttttttttttttttgagacagagtctcactctgtggcccaggctggagtgcagtggtgcgatcttggctcactgcaagctccacctcccggtttcaaagcattctcctgcctcagcctagtgagtagctgggattacaggcgcctgtcaccacgcccggctaattttttgtattttttttagtagagatggggtttcaccgtgttggccaggatggtctcaatatcctgatctcgtgatccgcctgccttggcctcccacagtgctgggattacaggtgtgagccaccatgcccggccaactgttgaatgttttaaaggagcccatttttgagaaataaacaatgtgctatgtaaatgagagaaggatatcatttagatcgggcctggaaggatgagttgagttggatggtgaaatgacaaggagcatttaggcaaagaatctgtcaatagcaacatgtgttttggggaccccgagtgatctgctgtgactggagttgaagcttcttggatgatgagagaaataaaaaggaatgagaattggcaagaaacaaggctagaaagctaagttatagccaaattgagtacagtcttgaatgccatgctatggcattggaacattatttttaggtaatagtgggtgtcattgaatgtttttgagacaggcgtcagaaataccttttttttttttttttttgaggaggggtttcagtctgttgcccaggctggagtgcagtgttgcgatcatggcaaactgcagtcttaaccttccaggctgaagtgttgctcccaccttagccttctgagtagctgggaccacaggtgtgtgccaccacacctggctaatttttaaattttcttctgtagagacaaagcctcgctatgttccccgggctggtcttgaattcctgggctcaagcaatcttctcaccttgtccccacaaattgctgggattacaggtgtgagtcaccgtgcccaggcagaaatatcatatttttgttttagaaaaataactctccctgcagtgtgcagcatggattggagaggcgggaatgatggaggatgggtggggcgcggaagaagcaaagttctattgagttttctaacttgggtttgtcattatcttctgccttaaatctaaaaaaattaaaaaagaaaacaaaaaactatccattcatatttcgttcattaacatttgttaactgttaatttaaggttagatttgaataacagtccttccagtaaattgaattattctgttaaaataaataatatgtattattttattctaatatactctttcattaaaagcatacataaaaaacaatcacagcttaattatttaaggattcctctcacctcctttatgaatttcccctttatgtctttcactgtagtctaagcaattttttggtactttatgagcaatacaaggaagtttggccactgaatcagtaatgggagtttgaggttcagactggggaactgaatggttctggatatccctgctttcatttgctgtcaaagctgaaagtgttctaagacatatagaatggaaattattaagtcaaatgtaataaaccaataagcaagaaatcttattatgacaagaagtaacaatgaaaaagatgcataacccattgagaaggggacgaaacatacgtattactatttctagcatgttttacattggtccattatatatgggacctgtttcagcctcgtagaaaatggatgattttcagcaaaatctaccaatggcaggcctttggggacactggagggaaagggagcccttatgtataaaatgcaattatagccatgcaaaatggcttattgctgggtctggcattattgtactgctctggtagagacatacttaaaggttctattcctataaactgtgggaaatgatggctggtaaagaacataaggctgtttcatgaatttcacataacttcagatacattctgcccaccaatatgcatgggaagaagaatcccatggaatgagaaaagactgaatttgatattttattactttgctaatactttttattattttggagaattataaactttatacgtgcctttattaagtaggactgttactaattatagattaatattatcttactaaaaataatacaatttcagaatgttttggttggaaagatggcaaagagcaattaatacactcatagaaatcacactttgagctaagagaacagatggagttgaagacacctgcctccaagttcctatacggtgacagtgatggactctaggaatttatggcagcaattctctgtcatgtaatcataaaagccacagtgtaacacaagattatttgctgctttcctgccaatacacggcggtcaaggttaagacctccagagtcagacaggattgttctggaaagctgctgtgctgcttactaactgtgtggtctgaagcaacagacctacctagcctctccgtaattcacttttctcatctgtaaaatggaaatgacactattctagggtcgttttgggttttaaatgagataatttattgaaagcaggatttatcaacctcagcactattgcgatgtgggctggataatcctttgttgtgggaggttgtcctgtgcattgcaagatgtttagcagcaccctggcctccatccactaaatgccagtttcacctccccactctcctcctcccctagttgtggcaactgaaaatgtctccaggcactgccaaatgtcctctggtgtgcaaaaccactcctccactgtaaccagtgattttaggaatctacctggcacacagtaaacacaaaaaattagctctcactattattattattttgtattcctattaaggagcagtaattttgtatttacaaaatctttgtttcttttcttggccttcatgaaaatgtgtagaaaactggtaaaatgcaaggcatagggaaaagatgagccacaaactgtagaaccagcttctgaacagttttgttaaatgtagtgattatctttttctctcgttctctaaggaggagaaggtgaccccatacctaacccttggatactttctgatgtgttccaaattttaccatgccctgcacatgcctgagtcaagggaatgttgtcaccataccaagcctgctgtatgaggaaaagagaaaaagataacatggttaaatcacttgcatgctattaatacaagttgcgctctggtgagccaaaccatccccgaatgtaatttccgtgtatttcttcacctctcaccttctaccattgctattacttaacccactgacccagatagctgcttattaacatttaatacatgttgaagtgttagtgggctttgaacaaaacatgaagaagtttctgatttgcttttagctcattgcccttgaaccattacatgagtaattctttaaagtcctgctctgtcattgctataaccgtggtatgcatattttctttaagataaaaatgaacaatttatgaaaaagaatttcctccctcctccatgcatgcaagctttcattcatttaatgaatgttgatgagttcctattatgctagacattctaggctggagaggtcacaatgaacagacatggtgtttattttccagttgcttgtagtgggggaggtgggaggctgggagacaggagcacgtaagagggagatcacaacacagtgtgagaagtacaaagacatagaaggtgtgtgtctgtaggcacacaagggacaagtgaaatccatccaagggcccctaaccagtcttaggggttagaaatgttttccccatttaaaaacaaatgaaaatagaagtatcctcattctcctcctaaataaataaatagtcacactgagaaaaatacgggattcaatcaggtgggaacctgaaagtctgtgacatctgaagtgtgtagtcctcatatatgcaaaatgcaagggcatttcagaatagggatgtttaatttgacataaatatttattaattcctaagttcattccagaaaatatttgccatagctaaattgggcaaatagcaacttatttttttatttcttaaaatgtaaaagtaatacatgaacatgtttgaataaaagttcaaacattacagaaacaaacagaggaagaagtgaactcctctacctagccccctccccctcattccttaattttaccctcctagccaaagatgagcaattaacagtttggttcatgtcttttcagagatatatttatataaagtcacattatcagcatcttggtatgatttaacctaatatttaacctaattcaaattatcctacacatgttattctgtgactttctcttttctttctttttgagacggagttttgtttttgtcgcccaggctggagtgcaatggcgcaatctcggcttactgcaacctccacctcccaggttcaagcaattctcctgcctctgcctcccaagtagctgggattacaggtgtgtgccaccacgcctggctaatttttgtatttttagtagagatggggtttcaccatgttggtcaggccggtgtcaaactcctgacctcaggtgatccgccggcctcagcctcccaaagtgctgggattacaggtgtgagccacctcacctggccgactttctctttttctttaacaacacatctttaaactttgtgtgaacaaacagagattaatcttatttctttggcgcatgacatctctaaaagcattattaaaaaatactcttgagaagatagattaatgctacagcagagatgccaatgatggaagagttgctggaaaaattactaataataagggacaatttgaaaaataattcctggtcacctgaggtcagcccagaggcccagttctttccaaaaggctcagtgtacatggttaagaagcttttcagtatgcaaacaaaagaatgcccctgtccccttctccctgctgggctggcttttgctggctggtgtaatttaccttccagccacccagcgctctccaactgcactgtgccaggctccaagctgtctggaagagaggctggctggctccaagacccagaggccacagtctgagactcagatgaagtttttgtggttaacaacaaatgttaacttattttctgatgactgctggagtcttgggatactacctgatcctcctagattgttgtctagtataatttttcatactttgctttttttcataataatgccctaagagggcaatttgagtagaagcaacgttggatttatggtttaaacattgcgtttaaacgtccactctctccactgtttattaaaatggatagactggctaaatcgcatatcctcactgagccacaattagttttaatagctatacaactggaatagtaaaaaaatgtatatctgtcatttattgggtgcttcctatatgccaggcactgcttttagcactttacatatattaactcatgtaatagtcatcatagccctaggaggtggttatgaccctattctcaccctattttacagatgaaaaaattgaggtgcaggaaggttaaataacttgcccaaggtcacacagctagggagtgaaagcaaaaggtgcagtgtttgaagaggaatgaagagagaagttggagtggtttcagtagctccacttggccaccagagctagccaggacaaagagttagggaacattcttttttcctttcactttttttttcttttcttttctttttgttttttgagacagattctcactctgttgcccaggctggagtgcaatgggtgagctcagctcactgcaacctctgattcccatgttcaagccattttcctgcctcagcctcaagccattttcatgcctcagcctcctgagtagctgggactacaggaacatgccaccatgcctggctaatttttgtatctttagtagagacgaggtttcaccatgttggccatactgttcttgaactcctgacctcaggtgattcgcctgccttggcctcccaaagtgctgggattccaggagtgagccaccgcaccctgccttttcctttaactattgccctcatatcagataattaaaattttagagctggatggaacctcagagataagagatcatctggggcaaacctctcattttaagagggacaacagtaggtccagagcattgaagggatttggacaaggctcaaacttgctgataagagtgcagggcaaagattttgctgactatggtcctgtcattcccttggttttctccatttggttaaataccgtcaacaatttaaaaccactgtttattgtggaaaaagttaaacatctacaaaagtataacgaacctctgcatcctgcctcccaggcttcagcaaccatttggccaatcctgcttcatctatcttcccacccacgtcctactgcccctcacccccgctccactggaaaattttgaagtgactctcaggcatcataggatttcatcataagtactgaatatatcactaaactataaagactctgtttttaaggttagtacaatgctattatcacaccttaaaaattatcttgcttaaaatcatcaaatatcctgtcagtgttcaaattatcccatttgccacacatatttatttttatagttggtctgcaggaagcaagttttgaacttttattcagtataagacactgtagaggacacagagatggctaaaaaaaaatccctttggttctaaacagtaaagtgtgaagttgaaaacctactattaaaatggaacaatagtgcactatagtcccgtggtgcagagggaggcagcagtgtggaggtttgcctgggttctttctattctattctattctattctattctattctattctattctattctattctattctattctattctatttttctttttctttttttttttgagacgaagtctcgctttgttgcccaggctggagtgcagtggtgtgatctctgctcactgcaacctccatctcccgggttcaaacaattctcctgcctcagcctcccgagtagctgggattacaggcgcctaccacaatacccagctaatttttgtatttttagtagagatggagtttcaccatgttggctaggctggtcttgaactcctgacctcaagtgatccgctggccttggcctcccaaagtactgggattacagctgtgagccaccacgcccagcctgttttattttattttattttattttatttttgagatagaatcttgctatgctgtccaggctgatctagaactcctgggctcaagtgattctcctgcctcagccttctgagtagctgagactacaagcatgggcccagctggctacctgggttccaagcctacctccaccacttcctaaccaggtgatctcaagtaagtcacttgacctttcagtgccttcctttccttatctgtaaaatggggctaatgatagacctacctcaaagcgttgtttgaaggagaaatgcgataatacaagcaaacacttccatcagcacatgaaccatcaggattaattaataaacattagctagtattatatcttgatatggttatggcccataaataagtcttaaagtcacttgtgtagtaaaaagatgggtattccaatcattatgccatgaatatacaattatgtattatttaatgataatgagaatgatgattattttggccagaaattttttttttaatatgcaagtcaatactattggtgtttttctttctttcctttctctctctctttttctggagagagtcttgctctgtcgcccaggctggagtgcagtagcgtgatctcggctcaccgcaacctccacctcccgggttcaagcgattctcctgcttcggcctcccaagtagctgagactacaggcacgtgccaccacacccggctaatttttgtatttttagtagagacggggtttcaccatattggccaggctggtctcgaactcctgaccttatgatccgcctgcctctgcctcccaaagtgctggaattacaggtgtgagccactgtgcccggccccctattggtgtttttcaactggcttaagctctctctctctctccctgacaccccacaatcttcacaccttcctctgaagctgaggtcaaaagcattcagtacttgcagccacatttccagggcatttctgtcctaaagggccttagggatagaagagacctgattcctaactgaaaagggtggcagcagagaagtttccacaacccctatcctcaggataaccgttcatcctggagtgcctagttgatgccttttgttctttttcactactagaagtgtcctagtatggatgataaattatatgatcaccctacttatacgcaactcaaaatatcaggtgtgttttaaaaaacacaccttgtagagtcaacctttcctcatttatctctttcctcttgcctcgggtccctgccaagtaaatatacccatctccagagtcactttaaccactggaggcctgtggtctagtaatgatcagagactcctgtcgttcggaatggtttatgctacagcacctgtataataaaggccatgttcatgttgctatttttccattgtgttaatagtttctgtcaatcaacaatgagggatagatggctcatgcctgtaatcccagcactttgggaggttgaggcaggcggatcatgaggtcaggagttcgagactagcctgtccaacatggtgaaactccatctctactaaaaatatagaaattagctgggtattgtggtgggtgcctgtagtcccagctactcaggaggctgaggcaggagaattgcttgaacccaggaggtggaggttgcagtgagctgagatcataccactgcactgtagcctgggtgacggagcaagactccatctcaaaaaaaaaaaaaaaaaaaaaaagaatgaggggcagtccctaatctgagatcatttagttgcaaatgttaagaattgcatacagattataaacagttctgtctccccagtcccccaccaatcaggaaacttgatttatctttactctttcttgtgttaaacacatatttactccttgtatttactcaaccatttaagacttttattcttaagaataaaaagaagggccgggcgaggtgctcatgcctgttatcccagcactttgggaggctgagtcgggcggatcacctgaggttgggagttcgagaccagcctgaccgacatgcagaaaccctgtctctactaaaaatacaaaaaattagccgggtgtggtggtacatgcctgtaatcctagctactcgagaggctggagactgaggcaggagaatcgcttgaacctgggaggtagaggttgcagtgagccaagattatgccattgcactccagcctgggcaacaagagccaaactccatctcaaaataaaataaaataaaataaaataaaataaaaagaagaagaaaaccaggtttttctcctgcagcaatgtaatgtaacttctttatcagatcagaaggaaaataataaaagtaaaaagagtcatgatgttcactatgagattaacatagatttggattatacaaatttatgacaataataataatatattggatttcctggggccaaaacaaatcctgatgaagtaaaaaacatagggaaaagcctccagatgcataatttgtcagcaattatggttttgtaaacacagtgcctgttgggtgcctggcctgcctggctttgttttgggcaagccctttgtttgagactcacagttgacttacagtacaatttcctccaataatttatgatttagtaaagaggctgtgacaaggttacaaataattgttatataagccagaaaaagatgtatgacttaaaagatgtctgaaccatgtgctaaggagatttacggaactctaaagtttagaaatactcctaaatctgggaagcaacacagatttagataagatgccctattactttatgtatgtatgtacacatgtatttctgtgcagtgcctttgttgtaggaagttctcaggaatgattgttgataattatgaaagagttacctattagtatcatattttaaatactcatatatacattgggactctagggtttttaaattcaccctacacacttccatttctcactggacttgttccttctggtttctaatgttcattcttccatcttggctttagattgtgtttccacttcccttttcaaatcaccctcccccctcacctggatcttccagatctgtttcttttttctttttcttttttttctcttttgagacagggtgtcactctgttgcccccagctcaagcgattctcccacctcagcctcctgagtagctgagaatatcagcacgcgccaccaaactcagccaatttttgtattttttgtagagacgggattttgccatgttacccaggctggtctcaacttccaggctcaagccatcctcccacctcagcctctcaaagtggtggggttgtaggaaagagccactgtgccagcccaagatctgttttctctggtgctttcagcagagcctacaaacacacagggctccccaatcttcccttaatctcttgcctcttccccctctttcctcataccaccaaacctgaaaactttccaaggaataaatccctgggcctacctcttcacttctaatgtattgttcaacccactacattctgaattctggccccacacactgtgtatgtgtgtagtgggtgtgtaggtgtgacaatatgtgtttaaagttaccaaagacttgcaggtttagggacgtgagatattacagtaattaagcacaggggctatgtcaagggttccaatcccggcataggattcaaattttgtgccttccttgtgcctcagtttcctcatttgcaaaatggggagaacaagagtatctacctggtagagttcttggaaacattaaatgagctactgtatataaagaatttagaactttggtagacgttgtcagttcttattatgattacaaactcccgctgatgcttttctgcccttatcttatttgacctccctatgagatatgatacagttgaacactccagctttcctgaaaatctccttttgccacagcccttttttgcctttctgacctctgcttattgggatcctttaaagggtattttttttttttttttgagacaaagtattgctttgtcacccacgctggagtgcagtggcacgatcttggttcactgcaacctctgcctcccagactccagtgattctcctgcctcagcctcccgagtagctgggactacagaggcctgccaccacacccagctaatttttgtatttttagtagagacaggtttctgccatgttggccaggctggtctcaaagtcctgatctcaaatgatctgctgccttggcctcccaaaatgctgggattacaggtgtgaggcaccatgcccggcccctttatggggtactctctgcctgtcccttacgggtattccccaaggagaggacatctttcctctgttttctttgcaatgtacattttatccagagtgacctcatgcaaatctgaggctgcagtcccctctctgcagcctggtcctgtgctgagccccaggcttccatatctagtgttaagaagtctggcctggtgcagtggctcatgtctgtaatcccagcactttgggaggctgaggtgggaggatcgctttagctcaggagtttgagatcagcctgggcaacacagtgagacctcatctctttaaaaaaattagccgagtgtgatggcatgtatctgtactcccagctactcaggaggctgaggcaggaggatggcttgatcccaggagttcgaggctgcagggacctatgagggcaccactgcactccagcctggacaacagaaggagaccttgtctccgaaaaaaataattaaaaaaaaaaaaaaagtcggccggacacagtggctcatgcctgtaatcccagcacttcgggaggctgaagtcaggagactgagaccatcctggctaacatggtgaaaccccatctctactaaaaatacaaaaacaaaattagccaggcatggtggcgggcgcctgtagtcccagctactcgggaagctgaggcagaggaatggcgtgaacccgggaggcggagcttgcagtgagctgagattgcaccactgcactccagccttggcgacagagtgagactccgtctcaaaaaaaaaaaaaaaaaaaagtccacgagcatctcgaaacaaacaggctcaactccaaatccttcactgtccactaacaagtacctccatgtcttgctggatgggagcacatgtagctccacaatacttttggtcacacaggcctattgaatcttaacttccttattcatcccctctcactattctcacctctgtggacttaattcagttccctgtttctcctgtggatcactgcattaggctccttaccattttcttcctgccttaacttttgccccctttcaagtcacccttcactgagtttcttcactatctttccaaaaatgtaaatcttagcacaacaggctgcagcttaaagtcctttagtgactccccgtagctcagaggatgaggttctcatttcggagtatttacagttcttgtctatctctgtggcctcgactctccccactctcctccaagccccatttccttgactgggcagcactccttgttcttcctattccttatgctgtttcctgcctctagccccgtgcgtttgtacttcccactgctggaacattcttctctcctttccctttccccgctcctgatccttcagagtctaatacccacctctctgggaggccacatgagctcactggacaggtgctcctctgtgtgcaaacatcactgtgcatggctctgttagagtacttcatgccatgtaatttttgcccctttattcatctctcccctcatttgctggaaatcctgtgagggcagcatctgtgtcttgtctaacttggtatccctgacacctaatacactacatctgacacagagatgttcaattaatactgaatgaaagctggaacgaagaccatacattatctcctttcagactcacaaactgtgaagtggttattgttagtatagaatctaaccgggggattgtattaatctattcatttcttcaactttatggacaaaagactttcagatgattgctgaaaaccaagaaaagctattaaaaagcaaacttgaaaaggattatactcttgttgtagtaattccacccctggttaggaatgcatacttaataactaatcagaagcaggcaagttttattcaccaagacattaatcatcaagtaatttatgatagtaaaaaaattggaaaaaaaagagagaaatgattaaacacccagaattatggtacatccataaaattgaacattatactgccattaaacagtgtgtttccaaaggatttttagtgatctgtaataatgctcatgttatttgtgaaaaagctggatagaaaactgaaaatataccaagatcttaaattatgtaaagggaaaaaaacctcacacataaatagagaaaaaagaaaggaacatattaaaacaaactcttcagtgattgtatcttgagtgccttttttgttttttataatttttggtattttccaaattttctacaataagcatcttttacagtcagaaatataataaaatattttcaagttcgagattttagctgtgttagttgtatttgtgtggcattattactctttcttctgttgatggtgcatcagtttttctttggggatgcacccttccccatctcaggcctctggtgtgaagtggatccctgaccccggcttcaggggtgggcacatgactcagacatggccaatcagcatactccatccctctggctccttcccaatgggcacatgacttaagccaggtcagtgagactcggtttctcccataaacttttacaggagatgtttatgggggcaggaaaactctacttccgttggtactagtgagctgtaagcctagagctgccctgagtgtatacaaggttggcaaaacaacacaggaaagtattgaggataaaggtggaggaaagtgtacgtgcacttgtgcacacatgcatccacacacactcgcccttcaagtcctgataactttgagtccttggatctaggaaagtctgaaacactattgtccctggactttctggttataagagccaatacatttaggcttctttgtttgcttgcttaatttaagctgcttctataagttgcaatcgagagtccttgctaaaagaattatgaaaacaatgaaatacataaagcacaatccctgaacatgcccaggactatcacaaaatacagtatagaattaatccatacatcctacctgagatataaaacatttccatcattgccaatgttccattggacactgctgatctataatatagttccttatatattacagcatatatgtccactcatagtgccttatatatatgcttcctttctttatgtaacaggcagtgggtattattaaaaacagctaacaaccctaaaggtacaagtactggaggctctctgttgtggccagcattaaaattttaattcctggatctaaggagatttagcgtgtctcaaggttgggctgggagatattttagggtatggttttttttgtaatcagtacagaaggatttcaatattgtgtcaaccaataaggccaaattggtgtgtactggctgaacataagctctgttagcagatattatagtttcttacttgagtacctattttccctgctggactgtgaattcccctagacagagactttgtcttactcatttatgtgggtcttatgcctacctaggtgctcaaaagatatttgctgaatgaaaaacaggaatgacggtccaacatggtataactccctattcagtttttttttttcctgatagaagttccgtgcctagaattaaattgcaatatggtctcttttcacccactcttttgaagatgttatcctctccaatatcagctgattgaagaagaaaattgtaaattttctctctcaggcataatgttgatattttaactcatagtgattttttctcaatacaaaatgaattttagaaataaatcaagatcccagaaacttatgattgctttgagtggtatcttttatctgtcatcctaagaaaaacatgagatctgatggcccagagcacagagacctttggtatttcagttctcctacagccgcatgactcgaaccttttgctgggagattgggatgtaggtccccatacttgattataaggactgtgagggcaggggccacatctgcatatctgtctattaataatagtactcctggtacctagctcctccttgcttcacagcagacactaaacaaatgcttgctgagtgagtaaatacttacatttaaagagaggcaattatacacattgatcatttgatcaccctctagcactgataatttttaagtgattagctttaaaaatcatttttcttacatcaacctgggtcctcacactattaaacaacaggagagctttcaatattaaatgaagtggggcagctgggcaactgtaaattttggatgatacttcagagaagagtctaggtgtatctgttctatccctttttctgatgggcatctgccatttatttttccattcttaagctctcaggagggatgtcttattagtttatcagaatgcatagggaaagctcatctttcttggagtaggtcttccaataagtgttcaagccctgggtcttccctcactacaataataaacatacctgctctaccctcctcacaaagctgttatcgtgagcatgaaaagacgagtcgctgtggggaagaactattaacccctatacagatactgttgttgctttccgttcaaggatccaccatgagactgtgggtaaggcactttctgggcagtgaaatcgggcttaagagaatcattgtacttttattttgctcctgggaccggcaagggcagttaagagccctagccctaaaactgtcgtctgttacagaggcagagaaatcattactggggttggcagcgttggggggaggggggaaaacgtgtatgaaaacctgggctcccagagcaaacttcgccacgcgccctccatcgcccctgtctccacacaagtcccggcaggggcttcttgggcggaggccacgccgaccaataggaacccactgtgttcctacaggttacgaagcaggtggagaaattgagcagaaacaattagcgaaaccgggctcagcctttaccgcggtgccaggagctcctaacaggcctggaggggaatgtcggggctcaatttcctaacgctcccctccccatccccatgccacctccacgagcagcggcgtccagcctcctcccgcccgaacgtgctcgaggggcgggcagtcgacctttattgtctggggagcacctggcaggtggcgggcccgtgccctaacgtgtgcgtggtgcccagcttcacaaagcgagcgggcagcacctccttggtccgggaacggcctcagcctggccgtccacatcccaggggtggaaaggtggagagagaaaggggctccggagtcaagagcggggagagagggcgcgcgcgccctcctcctcccggcgggcacggccccccggcattaacacgtcgaaagagcaggggccagacgccgccgggaagaagcgagacccgggcgggcgcgagggaggggaggcgaggaggggcgtggccggcgcgcagagggagggcgctgggaggaggggctgctgctcgccgctcgcggctctgggggctcggctttgccgcgctcgctgcacttgggcgagagctggaacgtggaccagagctcggatcccatcgcagctaccgcgatgagaggcgctcgcggcgcctgggattttctctgcgttctgctcctactgcttcgcgtccagacaggtgggacaccgcggctggcaccccgaccgtgcgactactcggcgaagcctgtgcctgggagggtggtacccgccagggtgcatccggagagaggactgcgggccctcagtgcccgtgcgttccagcctccggggagactccaggtggccctcggactctccggcgccctgcctcgctcacctgcgcgaggagaccccagctgctggtggtgggggacgcgaatccggggttcttcgggaatggggacagcaagagggggttaggcgtgagcgaggctgcaggctccgtgcgagtttggggtggcttttgtgccgacgttgcgcggggggcggaggcggggggctcaggggtttgcaccgagcgccttctcttgccgtgcgaggcgcggccgcagcttccttttgttaaaagttgcgtgtgtgtgaccggcgcccgggaggacctgcctgcaggttctccgccgcgctgagggcaaagttagagagccctttctctgctctgcggctactgccttccaaccgcaggcgctctttgtgcccagagctggggaccgacccgctgccgcctctgctcgcggcgccacccgtggagaccaatcgaaggctgcggcgtttccccgcctccgggttaggcttttgcgctgggagtgcgcggcgtggggctgttgtggggccggactcccgcgagcctggaggtggtggcgacagggacaacttgggcagggcgtgtggaaagcagccgctaggttgcagactttttgctttcgtacatcccgtgctcgcccctttctgccgcggcgccgtttcattcctgccgcgcgccccggggcggctggaggctgtgtttgccgcctgctccgggaaggcaagggacagcgtgctgggactctgcgttccctgactccaaccgcctagcacgccggccagagtgcccggcctgcctggcgggttctgaaagcccctagttcccggtgtctgcgacctgtattcgcaggtcctgttttcttcggaaatttttgagattcgtgaccgcccgcctccccgcccccgggacttctatacttcagggctgcctgggggtggggtgggagatggcgtggaactttctgcaaatcctactcagttcttaaagctataacagaaatccaggtatatccgcgcgggaactgggtcttaggtgaaggatttgcaggttgctggagccccttggtcagattcctgcctcccgttcccttttttccaggtgtcgctggtgcgggcgagtgcaggtcgcccagctcacccctgaagccctgctatctcccaggtcattttttaaaacaaacctttaaggttaccctgatgatgtaaggatagaaagtgagtcttagctggaatcaagcgcttgaaaggaagcggcgcaatgaacggttttgagactgtcgactaccggtcagtttctctataaagtctccaggcgcagtctgcagcgtcctggacttgtaactattgtgagggctttcctgtggggggcagagaggccttgcatctggacccctgtgcagcaggaggggtcagcaggggtcacgagggagtgttcggattctctggaggatttgatcacctagcttaaaacaacacatctggtctttatgtttttgtgccttgacctttttaatatcagttaagctatgtgaactagaacctagtaggagactagaaagaccacatcgaatatctcccttttaaaaaattaaaagaatcaatggttttcttctccccaatagatttttggcaaagggaattttaaggtctgtctcctgggggggcagtgtggtgtaacgacaaagccttgctctgtcccctgggttctcggtttctctgccatttcttggctgcgtgcccttggccaggttgcttagggcaggttgcttaaattctgggaaacgcagtgcctccagagtacaaggaggcatctgcatcatgaaggatcctttgggtccagaattctcctccaatgttctgagtgtagactcagcactctttttaactattcccctggcccctgtctgcctctttgaaattcctctgcctctcctgctcacagggaagtcatagagtatgggtgcatctgaccggtctgcccctgactgaagcaaggagctgtggcttatgcttactgcccttcaattcccatatattcctctgcattgccctttgagggcccccgccccccaagtattacagctcctgtgcctaacaggatgaacctgctaggaatagtgaatcataccttccccgtttcgttcctgcaggtgtgaggctggagtcattctcagcagctggacacaaggcactctaaattattatcctgctggaaataagagaccccagataattcatttatccctattctgttttttcccccactcattcccattttttttctcatgactctgtaaatcatgtaatgctatgcatttatagcatgctttctaatgggccttaagtttcgtatgacatgtgtggtgtacatagttgttgctcttcagttggaaactgtgtgccaggccttttgcttggggctttacctatttctagtagtctcaatgagcctaggaagtagtactattattacccctaacattttacagctggagaaactggctaaggataagccctaaatcatcagtggtgaagcctgatgagattggctgcatgtgcccagctctatagccattcacatgattcaccagaatctgttgtaagactcattcaaaaatatttaatgagtttttactatgtgccagggattgttggaagttctgggaatacaggatggccaatgtcactaccttcccaattttggtgaaaaatatttagaattgcgtgtcttatgaaagcggattatttgtggagggaggattaattaaattttagcttggaggaagggctgtaggcatttgaccctgtggtatgttggcttagttgttagctatctcattccagttagcgtccctcagaaatgaaggtaagctgtttctaaaaggatgatgcaagccagttaaaaatccatctcccactccaaaacataaaaatggtcttgtgcataggtgtgaaagagaacacccccaataatggctgatgtcattggctatttaccctggatagcatggtgagaaataatgacaatctaccatccaaagccattttttctcccaaaagaaattctcatcagaaatgtgccaagtattctgcgggcttcccttggagaacatttatgtacagatgttgtggtggtgatgaattttgctgctgttgttgacagcccttcgaagttacccttagggttttgactcatttcctcaagtctcttccagctgattaaagaaggacacgaggaaatgaacctcggtgtctctagcggaattctcagagctggcctgcagtgtggggaccccttcaaggtagtggtcaaggctgtggcagctttttcttcagaatgaatgtagtttaagagttggcaggctaggatgtgggaaatgctttcttttgctgcattaatgtgcggtaacttttaaaagttgagattgaatgacatttgcaggaatccaaatatgcaaatttcatgtgcagttttggtaacttgaatagatattgccacagctataagtccggattgaagaaggcctggggaagagttagaggaggtaaaagtttgcctggagggcaaatccagtgtaaatctttgttgtacttagagaggaattgagttgagtcatagagaggaattgagttgagtcggcttggcccagcagctctgatttctgacattttttggatgtgatcatacagctcatcttttgacctaagactcttaataagtaaagagcagttgtaatctgatagcccgaggagacatgttttctttggcctacatgatgctttttagaaaacattgaggcgatattaaacaatctagagattttttttaaatcaagatctctatttctgtctcctctttaagaattgaaggtcatggcccctgtagatgaggcctgtgctcttcaggttgcattaggctctagggctttatcctgccatcccttaggcattccccactgggccctggtgagtgcaggaatccaaatatgcccctgggaccaggcagatgacaagtgggaggagacaggccggcctaccttgtgttggtctgatggcttcatgactgacagcttgatggccttagagcaaattgtttaacctttttgagctttcattgtccatcctagttttgccacttattagctctgtgactttcggcagattacttaacctctctgtgccagtaaatgtgttgctacatgtaaaacttttagagtggtgcctcatagtacaggctcaatatgtgttagccataattatcgtctgtaaaacaggaattattattgtccctaaaatgggaataatgcctactcttttaagatgattgccctaaagattagaaaggcattttttttgtttgttttaaagacagtatcttgccctgttgcccaggctggagtgcaatggcgcaatctcgtctcactgcaacctccacctcctgggttcaagcgattctcctgcctcagcctcctgagtagctgggattacaggcacccgccaccatgctcggctaatttttgtacttttagtagagatggggtttcaccatgttggcctggctggtctcgaacccctgacctcaggtgatctacctgcctcggcctcccaaagtgctaggattacaggcatgagccaccatgcctggccgacagttttaaaaataagctttaatttttttggtcttgttttatttagcttttgataagagttaggaaatcactagtcctagagattgaatagatcttgaactttttttttctccaggggggaaaaaaaaaaactacacatcttgtaagattctccaacataacatttgtgtctggtacttttcccattcatcttatgttttagctttcatgcttacattttggttatgacacacttttgttagacatcttcccatgcatacctttctgacaggttttcaacatttttgcaaaatttaaggtttaagccaaattattattcaggacatgtggcatcagttaattacgagcttgggctctgaaattgacacgctggatttttattccagttctgcctcttccctgctgtgtgctctgggacaagacacttaacctctccttaagcttcatttcctcatctgtaaaatggagatgatgacatagggcccctgcgaggattaaatgagattctgcatgtaatatgcttagcatagtgccccgcatagaggaagtgtgtggactccactatcaggctgattttcttatgttcccctttcagctttgcctcttagaaaaaaattgaaaacgtgtaaacagaatatgtagagtggtttttttttttcgtattaagatgaagttgttaattagtggtaatgcatgtttatctgcttggctctttgtttagccgtattcttgggttactttccaccaaaagagatacaaatttcttgataaaagtttaggttgggggaatgtctgcaaatggccattttctgtaggtgaataagtacatgtagttcacctagggtccatgaaagcagtcaaggagcttttccatgactgctttcactaggagttcaaggaccaagctgaacttgtccattgccccaggctagacacagcggttagtgttcagtaagtattagtttaacatcttttctattctccagcacttacactaagctttgaacataaatggtcagtaaacattttggattcagtttaacaaaggcttatcaatccccatgccttggtcctacgttacaggctgggggtggaggagggccagggcaagagcacagcccctgattcgaagtagaatttggttttcttaagtgtaaagtgctctgggcaggattttcaaggagatgagcttaaatcttgatgggcaggtaatagagatcaggaatcagtaagagcatccacataggagataatatttgagattaatttctgaaccttaaaggaagagggcagtgtagttgtggcttcagctgaaaaaaactacagtacaaggaacaaggcattaggatcttacttcaggattatcaaacctttctattggtatgatggctgggggtagggaattggctgggaaggtaagactcctcttactagcctcaaggagcatggagggaatgtgtatttagtgctgagtttggtctaggttatgaagaatgctttgaagtcaaggctaaggtggacttgacccaggagtggccccccaggctttgcatactagtccagggctgcctgttccaccattctgtccaattagacatactccccagcctgttccaatagtctgacgaagcgagaggccaagccctgccttaaaacttggacactcccttgctgtgggcaaccaagactaagggagagtctgtttttattatttatttatttatttatttatttatttatttatttatttatgagacagggtcttgctctgttgccaggctggagtgcagtggcacgatcatagttcaccgcagcctccacctcctgaactcaagtgatcctctcatctcagcctcctgagtagctgggaccccaggcgtgtgccaccacaccggctaatttttttatttctatttttgtagagaatagtctcgaacttatgagctcaagcgatcccccagcctcagcctcccaaaatgctggggttacagatgtaagccaccacacctggcctgttttttttttttttaatagtaaaacatacataaaatgaaatttactaccttaatcatctttaaatgtatatttcaatagtgttaagtacattcatactgttgaacactttcatcttgcaaaactgaaattctatacccattgaagagcagctcccctctccttcccccagcttctggcaaccaccattctactttctgtctctgaatttgactattccaggtaactcgcaaatgcagaaccatactgaatttgtctgttttttgactggtttatttcacataccgtaacatcctcaaggttcacccctattgtagtataagtcagaattttcttcctttttaagactgaaaaatattccattgtatgtatagaccacattctgtttacctgttcctcctttgatggacatttgggttgcaaacaatgctgtaatgaacatttgcatgtaagtatctaagggagatttttcgtggagactatttaggagggttaaactcatggctgcgagctacatgttggggagctgggcagaagatgggctctttagattatctctgagtgaaggggtagtggacctgggtattagggtacatgctttggaaagaaagcgcccttaagagacacgaggaggataaaggtgcaggtcttctctcattcggcgtatttatgggcaccttctgtgtgtcaggcactgatgagattgaggggaaggagaactggaattatcatgggtgtaggtaactgggagtattgttgatactatggaattagtggaaataaagccaagaggaggggtggcctatttgagggagagaatatgatgttggactctgctgggtttattcattgattatttgtgagctgcattttcttgaaactcaatttcacagacatggagggaagacgtcaatgaaatcttagggtcaggtccctgtaagaaataaaactaaaccccaaagtcacaaaacatggctctataatattacggtagcattggggattataaagaatggtatgttaactgtgaaccagtcttatggtgaaaagtaagttttcatgaaaaggagtgtatactaggaagagaatcctgtattcttctctgcattaggccatgtttaaggtatgttttttgtttttctcagaataaaatggccatactgggtatagaggaggacatagaattgacgaaagctttgggaaataggtcctttgaaagcaacttaaagaaattggatttattaagcctggagaagataaggtgagggaaggtttagtgaatgacagtcttcaaatatttttagtgtgtgagtgaaaagtagaacaaaatgagagtcatttaaattgccccagaaggaaattgaaaatttttttgtttttgttttttgttttttttgttttgttttgttttgagacagagtctcactctgtcgccaggctggagtgcagtggtgtgatctccgctcactgcagcctccacctcccgggttcaagtgattctcctgcctcagcctcccgagtagctgggactacaggcgcacgccaccatgcccagctaatttttgtatttttagtagagacggggtttcaccatgttggccaggatggtcttgatctcttgacctcgtgatccacacacctcggcctcccaaagtgctgggattacaggcgtgagccactgcacccggcaatttttttttttaagggaaaattctttcattagaagggttggcagagactttattcagttatagggcctttgctggagctgtgaagaaaaccaagtaattgtcattttgaaatggttcttaggtcctccccaactcagttggtttgatggccctttaagggcctgcctgaaatcgtttgggaataattcagaaatgggaaaataaccaaccgtttttctttcctcactgccttggctgtggggcagagtttctcataaatgctgaatagactctaacataatccactactatagtcacaatttcggctatattgataacagcaagtaaagaacccacagcctaaaaatgggttattgatctgttaggtgtggcgggatctaaacacagaagaaattgtacggtgtggtagcttaaactgagtgtcaaaataagacaaaaggaagctcaaggtctagagaaatccataatctatcatttagccctaccctaagaatcgctgtgctataacgcagcatgtaggcagaaagtctgtaagcatgaaggacggctcccaaagtccttttctcttgattactcaggggtggattggttacccaccactctgactaccctttccatctgtcctttccctctggtcattttgtggtcatggctcagtggcacgtttgagatcagcccatggtccagtggggaaggtggtagaaatgacattgcaattcagcagctactgcttgataacattttattaatacctgtcactttgaaattgatgagtcttaagatgggatccttgcctttaaggatcctaggacctataggaagatggtcctgggtaggcgccaatgttacaggatttgtaataagatttaagttaacaattccagtcctattcattaccattggtttggaggacataggcatcacttcttgaatggccaattgaaaggaagataggggcctgaattaaatcttaaaagagtggggtggaatttggtcaagatgtgaagaggaaaagcaaaggttagagttagccggaaggctctgctcccgccgacagaacgtctgtagagagtagcggaagatgagatgggataatttttagggcacctggatttttattcttcaataattgaagtctttcctgcagtgctatatgtgatgagatttttgtaaatgtaatctggctaagtagttgcctattcagagaaataacttttaaaaatggaaaagtatggatatcacttttgcatgtattacctgtgttgtatgttcgatgcacatccagtatggatatgtattttgagttgtttttaagtccaaggctaattctgctcccttctccctaccgaccttccccactcctagccaagattagagattttgtgggctcaacttctgattgtggcagtagatgacctttcatttgcttattaacatattttaaatatttagcaaaataatacaccttgtttatgtcagtttattcattgaagcaaagatagcaacaaacaagcctgcaaaccttgataaggagcctgtgtggtttggaacatcttgagattcttccctggatccccccgagtcctgttttagaaacctattaggggcacactggtggctgccctccccaacccagggagtcttcggagggaggaggaggtggctgtttgtggtgggcagaactctgtcacttaaggaagaggcgtgtctgatagcacttgccagtagtgaatgcctcattcttgaccaagtagaaaaaagataagagggaaaatgaaaaaggtgaaacggttctcctttaccttgtattttaaattgcttagtgaggcaaaatatccaccttcatttgggtttaccccaggtaactcatttcacagggtgttagaacatttcagagggtgttagaaaattccaaacaatggccgggactcccagtaatttaaatataatggcctatgcgggttcttaagcagaggaattagttaacagagttagaacaaaggagagcattatcacaaagagctctggaagttaatgtgtctctttttattggaaaagaagtatttctagaacaggattcaattggcttctggggaaaatatttactggagattttagaagtgtgaaaggtggcaggagacgttggctgtctgttattctacttggctagtgcacacttaaaaataaaacaagactatgttaaaaagatcttgagaattctacttggaaagactgaagtaaagatagtacaggtacttttcaaaggatataaattttggcttataaagtattttaaatgcaattccatcccaactttcacaatgcagacttcctttttagtggctgatgttgaaagaaggtaccttagaaagattttccatttaagaaatggttgatattgatatttatttggctgataaaacaccacaaggactggtttttagaattttttgtcattgttaaatcaagccaggattcttaacctaaaatatgttaggatagctaatgaaaatacttaattggaatgtttaaatgtttctctacttattttagtatagtctgtatatgtgcagctgggaaatagtatatacgtttttagccgcaccaaaaagcatcactttgataaaagaggaccccccccccttgcttttttaaaataaaccagcatatgtagaagggtttgtgagtttttttagtagatctgaatgtgttgcccaatttacattccagcattttcaagggatattatttaacatgatcatcttggtttcagaaccactgcctttcaaagagtctggcccagagcattgtgtgtgcctgcgagtgaggtgggtcccccacggggtctagtggctttgcgccatactggccactgggaacaccagctctggcggtacagcaggggtacttaacattacagctttattcttcattcttttgatcccttctgtatctttaatctgcccttataccagaaatccatagatttattcacaaataattattgaagcatcggaggtgtagtagtgaacataccaggcaaaagtctttgtcctctcttggggcttatgttttagtgaattatttttctctccaggagagagaaaagtccaggagtccagaaaggaaaaaaaaaaaaaaagaaagatgtaatttgaggggctatcatagaaagcagtttaatttagacttatttcagttccatattgtggttagttaaggaagaaagagaaaagaaaggtgatgcagagggtcagagggtaccagttcaaaaaagaggaaagccaaagaaagcaactagaacaataggaaaaggagattcaggggctgggggagatgggcaggagtggagtcagggaagctttgtgaggtgcttttcactacctgccaccagtgctgccctccagagggctgagcaccagctccatcccaccatgtccctgccccagtttctgtaacttcagagcagcaggcctcttgattcaacaggtgtttttgatggaggatttacccaagaggattgactagtgataggtgtcttcactttcaggacctttggagcctttaatgtgctttagtctgcaggtttggaactgtttgttctggaatgtgccggaatgctctttcacatctgagagagatgtttcagggtccaggctagatgctctttggtatctctccaaggactggagattctgcccctctttttaaaattcattcatgtttttcttaaaatatgaccgaactcctaactcttgctaaccttacacctgggattcttaggccctcagctgaagaacttgatgaatttcaactttaaagaggttcttctaacacttggccatttcaaccaggctttgctataaagtcctgtgaaattgggggactgaaagctaattacttggatcacaagttgcctgtgaaaactgcaaggacctgctgtcagggctcattaaaccccaaagtatggcaccttggcatgcagactactctgaccaagaggagactggaaggcctcagaagccaggtctctgttctttcctcctggttcctgctcccttttctcccgcaaagtgagtcacagaaaccagaattctttttccccaaggcaggtcatagaaactagaactcctctctcccaaagccagtcataaaacctagcaagttcactctcccttcttcctggaagaccctcattcccgaggggtcctgccccatccccaggggaaggggaattgtacagagcgggcttgctgggtttcaccactctgtccatcactgttaggccagatcctttgtgtccaatcacttttctgcatggctgttcattcatcaaacctaaatataaaaataaaggttttccctggggaaaaaaatatgacagacttcagttttaataataactgttgtaataactgtcggtctgtttgacacggtaccatttagccaccatcagccctactgcatgtcaagtttcaatgctcctgttactgtagctggcctgggtgaggtgccagcagagaggtgacagggtgacttcatccggctttttgcgttttcactttagagtggcctttcacagttccatgaaatgataagctctccagtttcaaatgaaggacgcctcaaattgagaactgacaccattgcattcctcaggatgggaaagttccttctccatcaattcttgggcactggagtaggactcttgctgcagatggtattgttctggttctcgagaaggaatccaagataaaggctgtctggggataaaagtggtaccctcttggaatatgggcaggaaggcatccctagtgaccatagccttggttgaaggtattaaggaggaatcttgaggtgcttgtctgggtgtcagttgacaatttcaatgaaattagcagcattaggtctataggtggctgcttaactaattatgaactcagctgcttaaatatatttgctccaggtttcacaattccttttatttacagtaattatcactggttagcacctattgttttgggtgagaatttcagggtctacatttaagtaaaccctatttaaatttattagttgactagggaagggttaaaaaagcagtaaggagtctatgccttctagagtattccctggcttgtttgaaaatgtgttagcagccatttttcaatatgaaagaactgaactttaaaaaaaagtatatttttatttatggcaacatttcaaataggatagtgtaatgaaccctcatataaccatctagcttcaacacttaccaatacggcctctacccactttatcttcccattattgggaagcatgtctcaagcatcatagaatttcatctataaatattttcagtatgtagtcctaaactacaaagaccttcttttctgaacataatgatgatgccaatgtcaaacccttccaaataaatataattacataatgtcattgaatagtattcacattttcctattgaagatacataaaaatataaacaaatgtatgcacatttaaaagaaagcaaacaagatctacacattgtaattggttgatatgtcctttaagtcatttcttctctgtaggtgttagccccgttttggttaaggaaactgcagttgtcctgtgcagcttttcattctgattgcattccttggtcttcacctgtaccattttgaatatttcctgtaaattggtgacttagacgtttgatcatactcagtttgattttttttttaatgagggtactgtgtaagtggtgtgttctcttgttctgctttctctttttggtgtacctttgggtatttgtgaagattcatattttttgctagatttgtatttttggttttaatggttgccttcagactgatacctttctataatacccttgtctgctgtttttgtgggggctattttccattgttgctaccataatatttaaattagccagcgtttgttctttgctctctctttactctcctgagctggggattggaagtaatattcttttacttccagttaatatctaaaaggcaatcagcaagcatattctacttttcggaacttcacctattccccatttttctgatggctatactcatttttcagagcatacagcaattatatactctgctgtctcccttgttaccatcatttagtcttagctctacaggtaaatatctgtttaatgctggcggccagtctttatatcatggctttcctggcattttggttttctgaaacgcaccctctaatagatgccttatgggaagtagttcctgaattatatgtccacaacggcgagtgtgtagtctgtatatttaaaggtcaggttggctagtataaaattgctggcccatcttatctttgcttggatacctttattattttactgtattgcattttgccataaagtggcgtcaaaatctgatgataatcttattttctatccctcaaatttaacttggtatgtttgcctagatacccaaaggaatgtttttccacctttattctttaaagcccactagttagttttatagtattggctgctgtaggttgattattttttttccatagacacaatgtgctcgctgctttaatgtgtaattttaagagttcttttttatttcctctccaataaagatttcatttaccatttgttctgatctttgttggctttaggaactcccattattcatgttagaccttcttagcctgtattctgtatctgccactttctctcaaatccttttaaccgcgtcataattcatttgaattgaaaaattttcctcctttccgtcttctggttcatttaagacactgttcatttttatttgctctcgtgttgtctttacctgtcatttctgaaatgattattttctttatttttaattcttagttcttttgcctccatttttaaatcttcattttcttcaatcaactcatttctgagttttaaaaattctgatttatgctgttcttcatagcttctttcatttagttaatttctcttggctccttctgaaatattaggtcatagctttcctttgtgcccttctggcgtgattttattgtttacacgatggatgtcattctgctccttagtttttctttaaaaataactatgtggaattcaactggattcttttctgttgttaaccgagttttcctatacttttaggagggccagtgtagatttcctagcatcagagatttaggagactctgttagttgttttcattttattttattttatttttgagacagagtcttgctctgcctccctagttcaagtgattctcgtgcctcagcctcccgagtagctgggattataggcatgtgccaccacgcccagctaattttttgtatttttagtagagacagggtttcaccatgttggccagactggtcttgaactcctgagctcaggcaattcagccgccttggcctcccaaagtgccaggattacaggcatgagccaccgtgcccggcctcatagttgttttcataaagtggtaataaaaatatgaactctactttcctatatcctaagactttttttttgtccctacccacactgcttacctgcccagactttcccttacctttgcccctatttcctcatcttagatctcatccccagcagcttctccccagtgtggggctttgccttggcttgctaattcataggagtcagacccctcccactccagaacattctggcacattggacatacaggtggcacagccctctccgcactcactaattaaactggaacttttttctctgtctactctcaggatgaccctctgagctttccagtgagtgcctgatagtggttcctgtagctgatggtagtttgtcatctagagttgttgtggatgttgtccatggtttttgagtctgctctctgtcagtttttatggttggggagagtcaataattatgctgccaccaccatcttcccagaatctatattgacattttaacacaaaatttggcaacctttgggtcaatgaaatctggataaagtcctgtcttgaaatctcaactcagaggtagctgcttttcaaaatgatttgcttccaaaataagttattaaaaatttgtaactatctgaaaactgattactatggaaatgaacactgtatggcctacctaacattagctttctaagcttattgtttatgagaaaatatagtggctgaaatcatccgagtgccaggaaactcactgctgagctattatttctgagaaaaatttataagaactgacatgcttttgtcattatttgtttggtgtgagattccttgagttctgaaggagagagtgctattttacagttttaaaagtattaaatcacatttatacttaatatcatctaataaagataacagcatttcttaattaggtgtattttcctctgattttttcccccactgaaaaatttgcatatctctaattataatcatttctggaaaaaatgctgctagggattgacatgatattaatttagatttccagaaatactaaatttccttcctccaacctgagttttcctccaattggccattgatttaaattacctactaaaaggttacaattttagaattgacctcttacccctctgcttttgggaatggccattatcctaaagccatatgaagaataaggacagatttctcaatagacatactggaaacttttgttatttaaattctggaagatagagtaagattgtttttagacatttcctcttgttttccacaaaaagattgagaagaagtaatttcaaacacagggctggtcgttaagaattctttgcaaagggaaacaggcttaatgtattgctctaagtgaatgtcacccaagaaaaattaagggaaaagtgaatactcattaagcaaattgaccagcaagcgttctgatgaatgttgaaacaaatttgaataaaccaattttgtccattagtgtgcttttaaaccaatgtgattgttttggcctaattattttctgttttgcttattcaaatgtagaatggctgcagaattaactattgcagcaattatctgattagcaatttagaaaattggtgaatggtatctgactactcaccaagaaatatctggtattttacagggctgtgtggaagaacacagactgtccagggaggatatttgctgtttttcactcactacaaatggcagctcagaggatctcactggattagtatgggctgtggatgtgggctccgggctctcagatgtagtgcaccagattgaggtctgatgtgctgcagaagttgtatttgccacccggtgtcactattctggagtcccgtagctgtgactggagaattctgcaacatttcccacttctaaagcttggggattcgagaaatctgtgcccgactggctgccaaagcttgtcagggggacccagtgctaggccgatttctaggtgtaaaagccaggcagatttgctcactcaagaaaatctgtttttgcaggtttgctttgagttccaagatacagatcctggtaaaattgtttgctgcgctaatgccctgagtttcttgtggtagctgggttcccgagtgtggtctggaccagcagcatcaggatcacctgggacttgttagaaatgcaaactctccgcccccacccaagaacctgctgagttggaaactctgagagcagggcccagccatctgttttaacaagctctccaggtgattctgctgcaggcgaaagtttgagaaccactggccttgagtgtaaaaattactgggctttgtcacagctgtcaggctgtgctagttaaaaagttaaagccctcgtggattcttcaattctcttaatgtcagaacgtcagaccagggtgcaattctcagttctccttgtgtcagactaagaaagatagatatgagtttcggttagtccagacaggaaaacagacaactggagtaccatgggacagtgctgcagtagaggcttcgagaaacctgcatgggtggagggagcaggggaagagtggtattttcagaggacaaatacgattgtgtcctaccctgattaaaacctgtcagagactgcccagtgctcttggaataaagtctgtctccgtagatccctttcaagcctccagtatctccttttgatctccattttgcacacagcacttgcctcattgttggctgtggagtgcacgctgcacccccaaaggtgtccagctcctatccacccatctgtggcctctgcaggagctgcccttctgtccactgccaggggcctcatgcttctccctggcctcctagtgcacttcacagcccagctcccacccgtcctttgcaatcttctctgacctcccagggtaggtcagatcagccctcattgtacagcgtgcttgttcgaacttatcacattgtaattacctaattgtataattattggtttattgctgatgtggagttaaatataaactctatgggtgaggggtggggaattcttgccctcttgactgtcccaagggcccagcacacagcaagctttattattggatgaatgaatggtggagcagtcctcatctttgttgttaggacacatgggctggttaatatattacattttgattgaggtgtcacctgagctttagacccctccatccctcccgcccccatccccactctcatccccaccctcgtcccaggagcatttgccaccaccatctcattctactatgggaaaggcaggtccctggcactgtggcagcgaaatttcataacttggttctaacttggggtctgccctgtgggacactagagagaagttcttgagtatcagtatttcagggatatggggaaggaagaactcctttgcttttgcagacattcataatacatgggtcagaagccagcagcctggagtaaaggtggccccggaaggttttcagggaaagtgactcttgcctcctctttcctcggggcttccaagaaacactgcctccttctgtcacagaagttgatggcaggctgggggttgtgggttgtgtttcttcccacccacttccaaatctatttgttagaagatacgcactcctttgccttttagtcaatttactttggcctggttgaagccagtgttttttattcctattctagaaggtaaaggcatggaagttgcccttcagaagcaacagctgtgcaacattgggacatttgtctaaaataagaaactcagccttgctgatttaatagaaagcttgacaatagcttataaaaatacatatattgagaatgagggctcatgttttgtgaaagattggggtttcaagacctagagggtaaagaggctgacgtgcttaatgggaatgttgcttttgatagaggaactggtaatctgttcactattttatttgcacgttgattgatgtgtggtttttgttttttacatttgaggctcaacatattctcttatacctatcgtaaacgtctgctagattaagtgaatgtaataaaacacagtaaatttgggaaaaattataaacacaattcctcactcactgtcagaataccgtagctaccatctgccaggagtgttgatagcaggaagaactataattttgtgctttgataacctatgttgtctgtttccttcatcttcatcagctgccatttttcttcatagcttcaatgcattccatggctggctcgctccttccttccttccttccttccttccttccttccttccttccttccttccttccttccttccctccctccctccctccctccctcccccaatccctgtgaggctgtctccctgctccttcacgttgccttacccccttctcttctcttcttgctgtcaagtgcagtaattatagtagtagtaacaacaggaccattttatttgagtataaagcatttaaaggatttgaagatggagattctgacctattttacccctatagatgtcaaaactgaagtttgtagaggtcaaatgagttttcccaaagtctcacattgcaatccatgcatgtctgactccaaaacccacacctgttttcataatattcctcttgttttcatctgctcacccaagctcagagaagcaccttaatttccagtgtctgatcctccttctaaactttccaatattgctgagtaaagttacaaagctggacccactttttgttttaaagctccttttttggaaataatttcaaacttaaaggaaaattgcaagattagtacagagaactccagtacaccagttgttaacattttgccacatgtattttgttttatatacatatttttttctgaaccatttgagagtaagttgctaacatgaccccctcccccacctttgctgtgcccccttgaagactcactgaaggagacagccttgtattattctatgagaaacactgaggccacccagggtgagttcctctgcctccacccaagtgcagcctttaccttgtccctctagagctgagggccctgctccaaggagtgacactgtgagctgctcacttgtgagccctttaaattaaactcatattctgaaacacatgcactgccttcctggaaattggctctctctagcacttaaaaaacagatcctcctctgtggcagggtaacacaaaggcaagtgaaaaggggctccctgaatgtttctaccaactccagagaggggagaaaggagatttgcctctgcttgttatccggagctgtaggtgaactgttctgctgctggtaattgaagtctatctgcagaacagttatcaagggcagtaaccttttttctagcaatggcctcagataaaacttgtttttcttattaataatttgtttttacttcctttggtataaaccatccctatggctataaagtgacatttttgaaagtggaaatagaaggaaaaatgtcctgtctgttcagtgtgggatggaggggaaggtgcaattttccctatttgacaggcccattaaagcaggatttcagagtatgttcactagcaaaatgtactgatttacccattataatgaaaattagcttaagtatctgagtcaagtataatttatagcatttttaagagctagaaaatcaggcctttataaaatgtagatcataattgaagacaggttttaaaaatgccttagggaaataatattaataaaatgtcaagacgaatggataaacaaaaatatagcatatacacagtggactattattcagccttaaaagggaagtcaacttttacaaatgatacaacatagatgaaccttgcagaccttatattgagttaaacaagcaagagacaaaaggacaaatagtgtgtgattccacttatatgaggtacctagaataatgaaattcatccagacagaaagtagaatcatgttgatcaggggttggagggagcagagaatggtgagtcattatgcaatatttctgtttgggatgatgaaaaagttctggaaatggataatggtgatggccgtacaacaatgtgaatgtacttaatgccactgaactgtatacttgcaaggttaaaatggtaaatcttatgtcatgtatattttaccatagtaaaacatttcttaaatgccccagttgccagatatatgtgtatatatacacatgcacacagataggcatatgtgtatgtataaatgttaatcagcctctcacttatctgtgtttcatttgatatcattcaaattagatgccataagttagaactagagtttagggttgtcacacttttttatgtcttgaagttttcattcgtccttttttttttttttttttttaatgagaaggagttttgctcttgttgcccaggctagaatgcagtggcatgatctctgctcactgcaacctccgcctccccagttcaagcgattctcctgcctcagcctgccgagtagctgggactacaggcgcccgccaccacgcccggctaattttttatattttaggtagagatgaggtttcacggtgttgggcaggctggtctcgaactcttgacctcaggtgatccacatgccccggcctcccaaagtgctgggattacaggtatgagccaccgtgccggccttatttgtcttcctcaaaactccatttcccctcctgagcctgcagggaattgacattttgcagaagcttgagtttcctgataggaggaaatttggtgattagtgaatattggagcgcctagctcacactcgcccacacccacacctgtccaggacagtgctaacatgaaggcagtttgcacttgtcaggtcctcctgcaggatcttgttgcaagaatctggtgatgcccatctgtttgtggagtgtgcagccaggaggatctgctcggaggtgagactgcaccagggctcccttttgtatgtcctaggtcttgggggggtgaagtctttgactagtgtggctgacctttgccatgctcttttgacctgtttctttttactttgttctgaattgttctttaagtgaaggaagaaaatgttcaaagaagggacgagctcgctaccccgaccccaaacttcacagatggtgagggccttgttctggtgtttattggattccaatccttagtgcttttctggttcatgtttcaatatgtgctttccagaaatcaaaacacagaaatctacatatttacggcagcggggatggggtggggggtgcggggaaacgggggactgtgctgggctgttgggaagaacccactggaaatgagaaagttcctcctttctgctcagggatggatcccagtatattttgcttgtcacatccagaccttatccaactccccaaagactgacttcataatggcagagaaaggtttcctcttagtctgtctctgagatcaaaaggggaggtctttcctcaagcattaggttgtatttttgttaggatgagtgagtgagaagagaatatattaagtagtcctatgaaggtctttgctgctggtaaggtgtgtgtatctaggagaagtctgaccacataattagctgagaaaggtccgtctttgagtgtcgaatgatacttgcatcttcatagttaattataagatgtcagagccgtaagtcaaatttcatgtttaggtccttattctaattctgtgtccaaagagtagtataaaaacaaagtaggcctggcatggtggctcacacctgtaatcctagcactttgagaggccaagtcgggtggatcacctgaggccaggagttcgagatcagcctggccaacgtggcgaaaacctgactctactaaaaatacaaaaattagctgggcatggtggcggaggttgcagtgagccgagatcgtgccacttcattccagcctgggaaagcgagactccatctcaaaaacaaacaaaaacaaagtagatgtttagttatatatttatattataagagaatcactgctattcattcttgccacaaacatttgagtgctttctatgtacaagaactgaattttctttttttttttttttttgagactggatctctctttgtctcccaggctggagtgtagtggcacgatcacagctcactgcagcctcaacttcctgggctcaagcgatcctcccaccttagcctcccaaggagctgggagtacaggcacatgccaccatgcctgactaatttttgtattttttgcagagatgatgtttagccacattgcacaagctggtcttgagctcctgggtaagcaatcctcccgccttgacctcccaaatttctgggattaaaggcatgggccaccgtgcctggcccaagcactgaatttttattaatgtaagagatttctttgtcttttttttcttttttttttgaggtggagtcttgctctatttcccaggctagagtgaagtggcacagtcttggctcactgtaacctccacctcccaggttcaagtgatcctcctccctcagcctcctaagctgagattacaggcacatgtcaccatatccggctaatttttttggtatttttagtagagacagggtttcagcatattggccaagactggtcttgaactcctaacctcaagtgatccatctgcctcggcctcccaaagtgctgggattacagatgtgagccactgcgcccggccgatatttctttgtcttgaccgtttttttttttttttttagaagacagagtctcgccccgtcacccgagctggagtgcagtgacgcaatctcggctcactgcaacctctgcctccctggttcaaacgattcttgtgcctcagcctcctgagtagctgggattacaggcatgctacaccacacctggctaaattttgtatttttagtagagacggggtttcaccatattgaccatgctggtctcaaactcctggtctcaagtgatcctcccgcctcagcttcccacagtgctgggattacaggtgtgagctactgtgcccggcctgtcttaaccttccgatggggcctatgtgtttaattccaaacatacaatgtaggatgattaaatcaggataattggggttatcccatcacctcagcatttatttcttctaagcatttaattacagatcttagaattgttagtggctttagactctttactttgtcaaatgagaaaaacaaggcctagagaacctaagtaacttgcctaatgatttagaatccagaactgctatgtctctaccagtatatattttccccttcacatccttcactaattgcttaagagcaaaagtatgcagttatggccgggcgcggtggctcacacctgtaattccagcacttaggaaggcagaggcaggagaatagcgtgagcccaggagttcgagatctgcctgggcaacatagtgagacctcgttctccaccaaaaggtgggggggtggggaagacaaaacccccaaaacccaagtgtaactacctgcaaaagtatgcatttatacatttcatctaatatatacaaatattaaatatttaacagacaccaaacatttaataattttgcttgtcttctccagcctgagaaaagctttgacagatgtcctgtctctaaaacacactcactggaagcttgagtcgttgctgctgggtcctcttagtaagtttccttagaagcacacagaacatttaacatgttctctatcttgggagtgctgttcaaaaagcagaagcagcccaagggcatcttcttttgccaccaggtggcacgcttgtgaattgggaactggtggaaggaatgagtcaaggtgagggttgcactaaaatgaatctcccagctgggcaatgttgaggaatctgagtggggaaatgcttcattgcagagaatgaagtctgtctgatttgcccagagatcacaaaaataaaagacagaaaagcagaacatgaaaatgctacaggaaaggtgggatcggcacaaatgataccttggcactatgtccgtgtggtttaaggcagaaaactgaagggctgacttggccctgaggaggaaactactcagtagcagaggcaggaagggcccaaaccacaggtgaatccacccaggttgaacgcccacacagaggtgtgtgggtggggtggggtggggtggggtggtgcagcctgactgcctccgctgcaaaggatgtgcctttgtgtgcagtgtgacatccctctctagccttggcgaacctgggaaacacttcgtctcacatgtccttggaaatgtgggacccacatgtaccatgggctcctttgtaccactgagagtctcctgaaaagagtaggtccaaaaaaaggggggcttgagcccaaaatgggcttctgcaccttatggacacatgcatcagctcctgggcaggtcaacttaggagcccttctagtcatccctctggctatccctcccctcagttccttctttctttattgccatcttcctctgtggatgttcatctccccaactcttcattctgagccttctggaagcaccctgtgtcttcatgctgccatcaggcactgtcccccacactcactgactccgagggtcctccctccacctcctcccccaaactcctccctgacaccagccagtccccacagttgctgctcccccggcagcacgacaaagctcccttcttccatgtcccacttctgccataccaatggccgggcctgcttctgctgtaccagttgccaggccctgcatctagagatcctggtttgactactgtgggcaaagctctggtggttccgacatgcagctgggattgctaatgagtgtatgagttctatgattgtttctcctcactgctgtcagtggccagtcctgtgccctggagacttgagggtgggttccccatccttctctgctccccaacctactaccttgtcctgaggttctagtgtccatctattttgccattcaaagtaatggcaaaaaccacaattacttttgcaccaaccttctatagaaggccctgtgcactgtctgatctggaatttcctggttctcctttagcagtggagtcattgtcatctctatcctacttcagccaccctgggccttgtcatttctccctggcccctctgttctttgtagtctccactccctccctgggggatttcatggacaccactaccaccctctgtgtgccagtaagactccagagtatatctgtggatataccccacctcctgcctccagtttccagaacctttttgctgctgcctgctgggccaaatgcctcaaaatctgttttacccctccaatctattggcaccccatctccccatcatgtaagacaaaaccagggatatttttctccttgcttcttcactgtccagggccagcccacccaaggtcccaggctcacctggcataaagccacccctccccttcatcccaccacctctggttgatgccctcatcagctcttttctgggtcgctgactggttgtctcctggctgacctttctccaattctgttccccttgcactgtccttcactgctcccagaggagtcctcctaaaacatacatctgcagctcacccccttaccatgacggaggaggcctccgggggttctgccctctgtccctctctagcctcacaccggcagcaattctgaatgattttgtgactcctaggcactgactccactagttctgtgatatttggtcttgaatgtctctcccttctcccctgacccaagtgatagacctttctcctcttctacccctcagcctggctgcacacatcacttgttttgagccctaggaatctttttctgagccttctccacttgcccactgccttagtttcccagctcagttctacataatactctgccctgttttagcctgtacttgcttcattgtatggtaattatgtgagtctgtcttccccactgggctgtgagccccttctttgtattcccaggccaaatgataggagctcaattcccatttcatcaataaggacacgttacacaagtgcttgctttgttactgatccagccttgtttgccattaattactgacactctagctttagctttatttctctgttctgtgattcccctgtgtcaattagttcatcatctttagaccaaccttgaaatatacttaaggagctacttaaaaaaaaaaactaaatatgctgtaatgaagtctgttattttgtgaattttaaatggctaatcatttttaaatggtatagtgctattgcttgaaaccttaaactgtccaaattctgtaaaatcactaaatatcatgtacataatacagtactgagacctggcatgcagatagaacatatctttaatttttaaaagctaaacagaaatttgcattgtccaaaggaactggtttctcaggcctggacatgggaatattacaatgaaaggtaaggaggagatgatgtcaatcagttacctatcattcacctcatgactaaacctgagtaggttttttctttttcttgaaatggggccttactccactcctcaggctggagtgcagtggcacaatctcagctcactgcagcctcgacctcttgggcttaggtgatcctcccacatcagcctcctgagtacctgggactacaggagcgtgccaccacacccagctaatttttgtattttttgtagaaatgtggtctcaccatactgcctaggctggtctgtaactcctggactcaagtgatctgcctgcctcggcctcccaaagtgctaagattacaggtgtcagccaccactcctggccctgagcagattttaatcatgagttctgcctaaataattgctttaatctctgtattactggattaaagatagatctgaacttaagagaaagtgtgatccgtccaggcatattctcaaacttttccatggaactacttttaaagattggaggtaccactggtttgagtgggacatttgggaatatgtggttgtaaagtaattcagtttcttcgaaagctcatttatttcctcctgaaaaaaatacatttgattttaccttctatattacaatatgtaaaacaatatgaaagactgtttaaaattatttaccactgagtgaaatcaaccttcaagaagactcataatcaactttgggaggccgaggcgggtggattacctgaggtcaaaagttcgagaccagactggccaacatagtgaaactgcatcgctactaaaaatgcagaaattagccgggtatggttatgtgcccctgtaatcccagctacttgagaggctgaggtgggagaattgcttgaacccaggaggcagaggctgtagtgagccgagatcgcgccactgccctccagcctgggcgacgacagagcaagaccccatctccaaaaaaaaaataaaaaaaagacttacaatcaaacatcctcaatgaaaaagcattgctctgtagggtgatgccacaaattatttaaccattctttcctttctgcccctttgcatcttctgtactgtagacattccttccccctgcacttagcaggtggtatattcctggcactggacagagaccttactttggattgtgagagctcacagtttggttgggttggggtccccataggactagcttttcctgatgctttggacaccccttcatgctttgagaactttgtcttcgccttccttttccttgaatacacatagaaacacatacacgtgcaaacacatatacaaagtcttcctggctcagctctcccctacaccctttcatggtccttctgggcagcacaggcctgtagcacgtgtgtcacctcttgatgttttatttcattagcattatgtctttgtctgcacaaggctgtgagctcccccatgagcatctagttctggttacacagtacatgcgtgatgaaaggtaagactttaatgacgacggtgcattgagctccccatagtagaacagggacatttttgagattctctgttgcatggcttcctttggttcatgtgggtgattcagagttgatttagtctccccactgctgggcaagagtgttttgaggacttgtgtggttttcactgagctcatactccccctcccccatctgcatgctatttccagtatcatctctttgtttgtaaagcctcatgggtgttgtgggcgattactgggatccttccatcatggttttcatccagtttattcctatggggatataaaagtgtgtcagaaacagtataatatacaaatcattagcttttttattacgaattgtggttaaacactatgtgaaccgaagagtagttgaactacaatgcacaggctctgccccagtcacagttcttcctgctctacttccccaaaactagaataggcctaatgtggtgggttttcttccccgccattattttgtctagttccttatatttgtgtccaaaagaggacaggtttagaaaggacttccttacttttaaccgcagctatcaatccagttgttggagctttagccttttgtgaaggatagaaagaccttgcagtcatggttgacctgggccagccactgctgaagttgccggggagaacccctgagctccatcaacaggtcactcctgcttccacagatcactgcacctagaattgcagtctcaactagtctgtgaattgacatgttaaaaaaatactacaggtatgctttgaatattttatttttacgaattgtggttaaacactatgtgaactgaagagtagttgaactacaacgcacaggctctgccccagtcacagttcttcctgctctgcttccccaaaactagaataggcctaatggacagctaggagatggacagctgcctatcttttgatggagggccaaagcctcttctttgagttttggttgagtgatgggctttctcaggaaagttctgagctgccattctttccatacaccacacccacaatgcagagtctgtgattccttatttctgtgtccttaaatggagtacttgtgaaacaatccaaatgcagaacccacgccaagtttttgtaaattggaggccctcctccgatctgctaatgtttgcccacatttaattcaatagtagactttctttagttgagcgacccatataaagcctttcttagttatggaagaattagcagctttctccccataagcacacactcatttttcaccaatttccataatgtgcactttatacatgtaatttatacataataaaatatcgaatacaactcccataagcaggtttggggataaaaccagatgactcatggtgtgagcagaagagcaaagatacactagagaagaacttaatagtattggacattaaaaatgccttgggcagggtcagtgtggtttaaaataagagcttccaggtctttccactcagagagttaaaagaccttttcctgccaatgcttatttagtataagctcaactgtatagcaaaactaaataaaaatagtgaagcaattaattttttaatgacatgaattaaaacaacattgaggggctcacagaggctaataatagaggccagtgtgatcagataaaaaagtgtcaagatagctgaggcaggttttaggtttagccgggccttaaagaattgttgagtttttaaaacattaattgcagtaaaatacatgtaacttaggatgtactatttttaagtgtcccaattctgtgtggcaccaagtatcttcacaatgttgtgtaaccatcactactaaccatttccagaacttcttcatatcccaaacagaaactctacttattaaataataactgtccatcccccactgtactccctccccacaccttaataacctgttctactttctgtctctgtgaattagcctatcctatgtacgtcatataactggtatcacacaatatgcctttctgtctggcacatttgacctagcatactgtttgcaaggttcattcatgtgtggcatgtatagaatgttactttttttttgtggggggggggggctgtgtaatgttccattgtatgtatataccacattttatccaagttattggaccacattgggttttataagttattggaccacatttgggttgtttacaccttttggctatggtgaataatactgctgggaacattggtgtacaagtatgggtttgagtttctgctttcaattatataggttgaattttatactgctagtgatgagggagacatagcaagtacctgaagaggttataagccagaggcatttcttttattttgagctatcactgaaatcttgcattgttgactcttcgtaagtgtccgcttcctcctctatgctgtttgagagcgaaggccattttctaggttcagcacttaccaagtagctgggataagtatttactgaataaatagttcccggagttcctagcttaaagccgtcattccttatagtgctagttggtctccagagtgttgggttttgccacctatcctttttttgggttaattaattaacatgtgttcagggaacagaaaacaactcttaatattagccttagccaaacataatttgggaagtacatttgctaatgcaaaaagtcctggtgtaaataaaacacaattcaacaaacatttgttaagaacttgctgtctaccacgcacatttcaaaatttggaatttcagagcaatttcaaagctaagttggaatacctttttgaaaggcgttctcttaatacgaacctctactcttttaaaaaaaactttgtttttcaaaaattgtgagactactataacaatattaaagacaatttaaaaaagagaataaacattacagtcccaccctaataaaagccctattttcattttataatgtgagtttataaatcatttattttgaaaataaaaccctgaatacttctggtggcaattattttaattattttttaaaactctagaagtgaagcatgaactcatgatcttgaatttagagggcccttatttggagggatgcatggctgtttgacttgatgaagccaagcttttcttggtggagcagcagaattgacatgggtcatcttttggggatagatctgtagactgttgacatctgttatagggactgggtgtttaggagcctgtcctgtctttattctttcatatgttcaggattgaagaaaatgtttttattactgtgctagagggaaaagtacgatttaggatccttacctgcaggatctaagaccttggagtggatgtaggagatatggacacagttgaacatcagtacaaggcaaatgagtgatgggctgcctctgttggtgggatttagtgaggacaggttatcgcaacatggagtggctagggaacaacatccatgaagaggctgtcttcagcggggctttacacaagacaagatgtgtcccagggacacaggcagaagggatgatgggcatgacaacggatgaagaatgttctcaggatccttagccagtcagcctaaggagaggcaggttgggtccggggaaaacagctagaagttaaccccatggcagttcctttaaagttgtaagagctgctactgttagctgctgctgcctctgttgtggttttgaggctggggatggaattgttaaaaggatattgttttaggctgatggacctcagagttttgagggaggatgagttggggtggggtgggtggcggctggcggggagtcttttaggagaggatattacttctgtgaagtagttggctggtctcaagtggaacagcaggaatggaagggatacagggtgtgtggagggggctctgaaggaaagaatgctaggatgtgctgcccgagagggggaagtcaggtaggaacatgtttggcagatgatggaaactcttcccatacataggaagtgggtgagtccggactgatttggaaggccaataagaagttccatttctggaataagtgtgcctaacatttattatgtgttttccatgtaccaaaacatagttctaagagctttacataacagccttataaaataagtactgttagtatccccactttacagatgagaaactgagggcagagttgagtaggaacttgcctcagggttacacactcagtggcagagccaagatgcaagtctagacagtcctaactcaagagccaggctctcacttggtatgctaaaaggctttcctgcttttctatgatagcatgtattaaaaactatccagtcctgttttaatctccttacatgtgttacctcacttgattctcagaaaaactctatgagatgagggtatttttatcctcattttccaggtgtggaaacttggacacagagttagggtgatatgcctatgtcacacagctagacttagctgcattggcctggtgtgtctcaggaagtcaaggatgtttatttgactggattgtaattatctatatccatcagatcaacccatgagaaaatggaattgattgaaatagattgcagtataaattctttaagaaatattgggtcaaatttgctatcaatatcatgcacattcattgggaactgttcttttttaaaaggaataaataatataaataatagcatctctattgctgcctctgtttttattatttagtgctctgtacaactctgaaaataatcctggccactgcgtgcccatattcttgctgccacatttagatgctgcacctagcggactcaacgtctcactctgtagcctttatgacgttgttgctgcctaataatatttaatgcttataattggacttattgtcttttgatctggggtgtactttgcttgacataatggggctacagttgatgccaccacaggcaatatttggctaataaacaggaattgagactggtcatctatacacacacctgcaggaaacaatttccaccctcctgtaaagcaccttcagtctgtccctacccacaagtgctcttctttctatctcgcatgtgagggggtctcctgttttctttacctttaagcctggtttggctacagatctctatttctgtcttgtactgccagaactacccaagggagaggtctgcatttgcagcttgtagccctggagcaaacaacacttcccactcaattgaaattgtactttagaatttccagcagtctctttgtaaccagattaggggtcttttgttcattccctgccatcttactgtggcatctgcccttagagccaccaccctctctttgaaactttgtactgcattgccttctttgccacttagcctctctcccttttcttcctggtggttctttttcttaaatctctcatgaccctttcctacaccgtcttggctggaagagccctttaagatcaatgcttggttggttcctcaaacccttttctttaatgatctgatcttgttttttaacttcacaaggtgtcactggaccaccatcatctgaattccaggtcataagcaacccactgctgagaagtcccattactggccaggttgtacctgtgagcaaattacacctctcacgtcccctcccctcagaatatgcccccatcccctatcctcacccatcctgaacttgtgtggctcactcagatcagtcctcatctgcaaccttgcatatggtggcaggggacataaatctgatgtgcatgaaccattcccttcaccattctgcaagaggtgactgggggccccagggaatcttgttatcacactgccccagcccacctcacctggggaccttgccttctgcctcctcactgaggtcttccctgagtcaaccttttgctttttcatcccgctgatatggccttcctctgacaatctatagtgtcttttcctgtttattctgaattccttactgtaggttctcattacttctgcctgcgaccagcatgtttcactcatttccttgaatctagttgattctctgggatctcactatgcatgtcacttctctgctgaaaaacctaaattgaatctacagggtccctgaggtacgttcccagaatttacacccagaagttcaggacccttgatggatctggtttcactccacgtagtttcacctgtcatgtgctccgcaaggtaccctgttttttagccaggctggtttctgaataactctagaggctctgtgctcacttcactgccagttcatgctgtcatcttctcctcctcctcctcctttgcccttatgatatggttacactccagcccacctcttgctttttcttcagattgacagtaaacctcatagctatgttttacttcagtactttgttctattgtttttagagagacagagtcttactctgtcactcaggctggagtgcagtgttgcaatcacagtttgctgcagcctcaacctcctgggcttaagtgatctcccacctcagcctcccgcctcagcctcccatgtagctgggaaaacaggttcccactaccatgcccagctaatgttttttctagtttttgtagatgtgttgggcggtgggggcgtctcactgcgttgcccaggctggtctcgaactcctaggctcaagcaatcttcccacctcagcctcccagagtgctgggattacaggcgtgagccacggcacctggccagcagtttgttctttaaaccctgaaatgtatgtgaggaccatgtgtcacactagcatggacttttccccagcatctagcatggtgcttttgtagatgataattaatgaataggtatttgaatacatggaggcatgcatggctgaatgaagtggctgttgtaaaatttctagggttcaggtttcatattcagagcctaaagtttgcatctttataaactaaatagtttcctatctaggaaacctatttaggcattagggtgttaaaacaggtgtatcattttctgccttagtgtttagagatttgtgaatagttctccttttgatgaacattgccatgtaaagagagttatacagaaataactgaattcacacagttttaaggaaaagctattctatgtcatggtcatgtatattctgccaaagagagtgacaggccagtagtttcttttttctttttccccatagtgtgagattttgtttctgttgtttctaagctgggtgtctgcatgtccacactgcgaagatggcccatattcagaatgaaaacttgacccaattgtatgtttagcccagagaaggctggggcattcagcacatcctggcttggggaccaaatgtgaccctcaggattaattgagggttggagaaaataattttatagatgaacttaagacattttagacagaactctcttttcagccataaatagcagggcagctttgtcctatttttattgtagagtacacagaagatggaactcagtattggaagaagtgctttatttcgccaaggaagaagatcatactcaacacgattctgtttttcttggcaggctcttctcaaccatctgtgagtccaggggaaccgtctccaccatccatccatccaggaaaatcagacttaatagtccgcgtgggcgacgagattaggctgttatgcactgatccgggctttgtcaaatggacttttgagatcctggatgaaacgaatgagaataagcagaatgaatggatcacggaaaaggcagaagccaccaacaccggcaaatacacgtgcaccaacaaacacggcttaagcaattccatttatgtgtttgttagaggtaaatgcttggctttctgcagtgctgtgctttcaagaatttaatatcctgctcttaattttggatgacatatggatgactgagccatagataaaatatttctggctgggtctagaaggcctaaaacacatgtttcttcactgttctctcccatcttttgatatgatacatagtggctttgggtatggccccagctggaggactgcaggactgtgatactcttcctaatgagattacagtaggtttagcccatttgtgctggtgctttgagtaaaccctgagaatcaattaggccctttgggaaagctgcattttaatgccttgagatactagatactcccacttagtaaaaacacttcagggagccgaaggcctctcaaagcctaaccagaccgacacttcgaaagatgtggcccactcttaaggagtaaatttcagaaaaataatttggtcagctaaacatcccatgtctgtcatgggttctttgtagagttgtccatagaaaaaaatgtgacctcttataaacaaaagaaaaataaatatggtagttggagttctttgctttatttcctatgacaagttcagtgatttgtctgtgattttaatagccttttcaagagtaagcatgctgggcaggggtgtatcttgtagttgatgtaaaaactgatccactggcagcttaagggacatatccaagtgacgggaggagaaatagagttctattttctagttctgggtgcccctggactggggctgtctttgaaacaggcctgagaggccttatccatggtattgtgaatgaataatggatacttttattctagattggagatcttaggtacctcctgagttcagttcctcactacagtatttggataagatgatctgttctgtcttccttacgtaattgttagggagccaggatggtacaaattctaacatgctccatcaggagcgaataaagctgactctaaagtttgactgtgcctctccgctttatcagttgtcctttccgaagtaggtagctgcaaagagatataccctggtaagtcaccacttcgcctcagggcatgcttctgtgattgctgagctaatccatgtgctgttctttacattcaggaaggtattttgcaatttccaggtggcaatgaagtatcatgacaattgaataaatgaggaaaactgttgaattggttaaatcactctaacagggctcacaaacattcttcatagggaaagtcatcttctgtatcttggaactatccttaattataacaaatgtaagatgtttgaatacttaagtaatctctgttacagcaatgaaggaaggtggggcatcattgtaggagctagactcaagtgacctacaaagagtagataaaacagtaactagctatggcctgggaccatccatagttcaaccatcatgaggtcatttatttgcagaataaattagtaaggttgggagatgcataatttatcttggaaaacttttttttcaaaattgatcaaggataaaacacaaacctatttcaatgatgtcaagttcattttgtgaaacacctgagtttcagatggaaaggacagtttaaaaacagattttaaatgtaatctgtgggcctaaacatgtatctgtattatgacactgtagagagtggcagcatattgtgtatacgaaattaggtttgtctggcttctatgaggccccagtcagcctgagccactccgagtctgttcctggtgtcctgtcataaacactaatggtgttcactttcactcacaagtgtcctggtgggctatggtatttgccacagaattcctgaaactcacaagctccccttgtgcatttgaaattatttgatttccagaagctacatttacatgtttcttcagaggaatatgaatcaagtgagactcacctatcatgggtactgggtggcctggtgagagttttctggattctctttagaagccgaaagactctggaccctggaaagggtcctgcaccaagtggttagaaggaggaagcctttcctgctctcactaggaatcatcacactggcttattggcagatgatccctggagttgtaataaagttttcccaaagttttaagagctcaaatattgctctctgttggacttgggtttgagttccaatcagccatttccaggtcatgtcactttaggagggttgcttttatgacaccgcagtttcatctatgaaatggcaataatgatagtactgatcatgggaggggcaatttgaagattaaatgagattaagtgtaatggtccaagcttagtgcgtgatacatggaaagcgtttaataaatgttaattctcaatagtactagatggataaattttgcttttgtttacacagaaaaaagcagccatttgggccactagtcatgaaaggcaacatattagatcttttaaaaagtgttttcagtgtctgtgaccagccattccaactactgattttggatatgcttctatagatcctgccaagcttttccttgttgaccgctccttgtatgggaaagaagacaacgacacgctggtccgctgtcctctcacagacccagaagtgaccaattattccctcaaggggtgccaggggaagcctcttcccaaggacttgaggtttattcctgaccccaaggcgggcatcatgatcaaaagtgtgaaacgcgcctaccatcggctctgtctgcattgttctgtggaccaggagggcaagtcagtgctgtcggaaaaattcatcctgaaagtgaggccaggtactggctctttcttatctgcctctgggagttgagaactcacttatctaaagaagacttctcttctcgttgatccaccttagtgtagtcaatcagggagctagctgttcatagttcccccagcttcaaaaaatgtcatctgcttttgaatttgtttatttcatggtcctgaccccgtgtggcagttccatgactgcctctcatagaggtgaatgtatctgccatagattggcatttagactggactgacttaagtcagcccaaagtttcataattgcatcaagtactcgttctaagggaaacccattgggtagcttgaattatgttggttgaaaagattagcatgcagatgattcattctttgatttactattgacatatgaattgactttcccttcagctgatcaattgcaatgcatcctcaaactgtttgagatctgagaaggaaaattccagttgactgtggaacttgttatggttgtgccgttatgtagaatatttcgttagctggaagataatctaggttttaaatctcagagatcatctaattcaacaccagttggcattcagctattgagtacagtttttattaaggcttttgaaaaagtatacttattgaaattagggaaaatttgattatttaaaacctgggatttccagaggtgagcagggtagggtttgcatgagaaagacgcctgtttgcttaaaagaatataagtagttgttggtcacatcctcctgacaccatcaaggttgtctgaaataaagattaaagcagcttctctatgctagggcttctacttggtttggaaaaagtgttttccagaagtattataatctcacagtgggcatttctgtctttttcactcaatttacttgaaggatgcttgatttaattgctggtaccttcagatatgcaagtagtacagataggttagcaccatgctttgtattttatttaaaagatgacaaagtaagctgtacacatttgaggagaaatggtaaatcaaaatttcatgctataatacaaattatttgaggggccacatttcttttcattctagccttcaaagctgtgcctgttgtgtctgtgtccaaagcaagctatcttcttagggaaggggaagaattc

SEQ ID NO: 102 - DNA, 182190 bp, Homo sapiens
gaattctttgcaaagggaaacaggcttaatgtattgctctaagtgaatgtcacccaagaaaaattaagggaaaagtgaatactcattaagcaaattgaccagcaagcgttctgatgaatgttgaaacaaatttgaataaaccaattttgtccattagtgtgcttttaaaccaatgtgattgttttggcctaattattttctgttttgcttattcaaatgtagaatggctgcagaattaactattgcagcaattatctgattagcaatttagaaaattggtgaatggtatctgactactcaccaagaaatatctggtattttacagggctgtgtggaagaacacagactgtccagggaggatatttgctgtttttcactcactacaaatggcagctcagaggatctcactggattagtatgggctgtggatgtgggctccgggctctcagatgtagtgcaccagattgaggtctgatgtgctgcagaagttgtatttgccacccggtgtcactattctggagtcccgtagctgtgactggagaattctgcaacatttcccacttctaaagcttggggattcgagaaatctgtgcccgactggctgccaaagcttgtcagggggacccagtgctaggccgatttctaggtgtaaaagccaggcagatttgctcactcaagaaaatctgtttttgcaggtttgctttgagttccaagatacagatcctggtaaaattgtttgctgcgctaatgccctgagtttcttgtggtagctgggttcccgagtgtggtctggaccagcagcatcaggatcacctgggacttgttagaaatgcaaactctccgcccccacccaagaacctgctgagttggaaactctgagagcagggcccagccatctgttttaacaagctctccaggtgattctgctgcaggcgaaagtttgagaaccactggccttgagtgtaaaaattactgggctttgtcacagctgtcaggctgtgctagttaaaaagttaaagccctcgtggattcttcaattctcttaatgtcagaacgtcagaccagggtgcaattctcagttctccttgtgtcagactaagaaagatagatatgagtttcggttagtccagacaggaaaacagacaactggagtaccatgggacagtgctgcagtagaggcttcgagaaacctgcatgggtggagggagcaggggaagagtggtattttcagaggacaaatacgattgtgtcctaccctgattaaaacctgtcagagactgcccagtgctcttggaataaagtctgtctccgtagatccctttcaagcctccagtatctccttttgatctccattttgcacacagcacttgcctcattgttggctgtggagtgcacgctgcacccccaaaggtgtccagctcctatccacccatctgtggcctctgcaggagctgcccttctgtccactgccaggggcctcatgcttctccctggcctcctagtgcacttcacagcccagctcccacccgtcctttgcaatcttctctgacctcccagggtaggtcagatcagccctcattgtacagcgtgcttgttcgaacttatcacattgtaattacctaattgtataattattggtttattgctgatgtggagttaaatataaactctatgggtgaggggtggggaattcttgccctcttgactgtcccaagggcccagcacacagcaagctttattattggatgaatgaatggtggagcagtcctcatctttgttgttaggacacatgggctggttaatatattacattttgattgaggtgtcacctgagctttagacccctccatccctcccgcccccatccccactctcatccccaccctcgtcccaggagcatttgccaccaccatctcattctactatgggaaaggcaggtccctggcactgtggcagcgaaatttcataacttggttctaacttggggtctgccctgtgggacactagagagaagttcttgagtatcagtatttcagggatatggggaaggaagaactcctttgcttttgcagacattcataatacatgggtcagaagccagcagcctggagtaaaggtggccccggaaggttttcagggaaagtgactcttgcctcctctttcctcggggcttccaagaaacactgcctccttctgtcacagaagttgatggcaggctgggggttgtgggttgtgtttcttcccacccacttccaaatctatttgttagaagatacgcactcctttgccttttagtcaatttactttggcctggttgaagccagtgttttttattcctattctagaaggtaaaggcatggaagttgcccttcagaagcaacagctgtgcaacattgggacatttgtctaaaataagaaactcagccttgctgatttaatagaaagcttgacaatagcttataaaaatacatatattgagaatgagggctcatgttttgtgaaagattggggtttcaagacctagagggtaaagaggctgacgtgcttaatgggaatgttgcttttgatagaggaactggtaatctgttcactattttatttgcacgttgattgatgtgtggtttttgttttttacatttgaggctcaacatattctcttatacctatcgtaaacgtctgctagattaagtgaatgtaataaaacacagtaaatttgggaaaaattataaacacaattcctcactcactgtcagaataccgtagctaccatctgccaggagtgttgatagcaggaagaactataattttgtgctttgataacctatgttgtctgtttccttcatcttcatcagctgccatttttcttcatagcttcaatgcattccatggctggctcgctccttccttccttccttccttccttccttccttccttccttccttccttccttccttccttccctccctccctccctccctccctcccccaatccctgtgaggctgtctccctgctccttcacgttgccttacccccttctcttctcttcttgctgtcaagtgcagtaattatagtagtagtaacaacaggaccattttatttgagtataaagcatttaaaggatttgaagatggagattctgacctattttacccctatagatgtcaaaactgaagtttgtagaggtcaaatgagttttcccaaagtctcacattgcaatccatgcatgtctgactccaaaacccacacctgttttcataatattcctcttgttttcatctgctcacccaagctcagagaagcaccttaatttccagtgtctgatcctccttctaaactttccaatattgctgagtaaagttacaaagctggacccactttttgttttaaagctccttttttggaaataatttcaaacttaaaggaaaattgcaagattagtacagagaactccagtacaccagttgttaacattttgccacatgtattttgttttatatacatatttttttctgaaccatttgagagtaagttgctaacatgaccccctcccccacctttgctgtgcccccttgaagactcactgaaggagacagccttgtattattctatgagaaacactgaggccacccagggtgagttcctctgcctccacccaagtgcagcctttaccttgtccctctagagctgagggccctgctccaaggagtgacactgtgagctgctcacttgtgagccctttaaattaaactcatattctgaaacacatgcactgccttcctggaaattggctctctctagcacttaaaaaacagatcctcctctgtggcagggtaacacaaaggcaagtgaaaaggggctccctgaatgtttctaccaactccagagaggggagaaaggagatttgcctctgcttgttatccggagctgtaggtgaactgttctgctgctggtaattgaagtctatctgcagaacagttatcaagggcagtaaccttttttctagcaatggcctcagataaaacttgtttttcttattaataatttgtttttacttcctttggtataaaccatccctatggctataaagtgacatttttgaaagtggaaatagaaggaaaaatgtcctgtctgttcagtgtgggatggaggggaaggtgcaattttccctatttgacaggcccattaaagcaggatttcagagtatgttcactagcaaaatgtactgatttacccattataatgaaaattagcttaagtatctgagtcaagtataatttatagcatttttaagagctagaaaatcaggcctttataaaatgtagatcataattgaagacaggttttaaaaatgccttagggaaataatattaataaaatgtcaagacgaatggataaacaaaaatatagcatatacacagtggactattattcagccttaaaagggaagtcaacttttacaaatgatacaacatagatgaaccttgcagaccttatattgagttaaacaagcaagagacaaaaggacaaatagtgtgtgattccacttatatgaggtacctagaataatgaaattcatccagacagaaagtagaatcatgttgatcaggggttggagggagcagagaatggtgagtcattatgcaatatttctgtttgggatgatgaaaaagttctggaaatggataatggtgatggccgtacaacaatgtgaatgtacttaatgccactgaactgtatacttgcaaggttaaaatggtaaatcttatgtcatgtatattttaccatagtaaaacatttcttaaatgccccagttgccagatatatgtgtatatatacacatgcacacagataggcatatgtgtatgtataaatgttaatcagcctctcacttatctgtgtttcatttgatatcattcaaattagatgccataagttagaactagagtttagggttgtcacacttttttatgtcttgaagttttcattcgtccttttttttttttttttttttaatgagaaggagttttgctcttgttgcccaggctagaatgcagtggcatgatctctgctcactgcaacctccgcctccccagttcaagcgattctcctgcctcagcctgccgagtagctgggactacaggcgcccgccaccacgcccggctaattttttatattttaggtagagatgaggtttcacggtgttgggcaggctggtctcgaactcttgacctcaggtgatccacatgccccggcctcccaaagtgctgggattacaggtatgagccaccgtgccggccttatttgtcttcctcaaaactccatttcccctcctgagcctgcagggaattgacattttgcagaagcttgagtttcctgataggaggaaatttggtgattagtgaatattggagcgcctagctcacactcgcccacacccacacctgtccaggacagtgctaacatgaaggcagtttgcacttgtcaggtcctcctgcaggatcttgttgcaagaatctggtgatgcccatctgtttgtggagtgtgcagccaggaggatctgctcggaggtgagactgcaccagggctcccttttgtatgtcctaggtcttgggggggtgaagtctttgactagtgtggctgacctttgccatgctcttttgacctgtttctttttactttgttctgaattgttctttaagtgaaggaagaaaatgttcaaagaagggacgagctcgctaccccgaccccaaacttcacagatggtgagggccttgttctggtgtttattggattccaatccttagtgcttttctggttcatgtttcaatatgtgctttccagaaatcaaaacacagaaatctacatatttacggcagcggggatggggtggggggtgcggggaaacgggggactgtgctgggctgttgggaagaacccactggaaatgagaaagttcctcctttctgctcagggatggatcccagtatattttgcttgtcacatccagaccttatccaactccccaaagactgacttcataatggcagagaaaggtttcctcttagtctgtctctgagatcaaaaggggaggtctttcctcaagcattaggttgtatttttgttaggatgagtgagtgagaagagaatatattaagtagtcctatgaaggtctttgctgctggtaaggtgtgtgtatctaggagaagtctgaccacataattagctgagaaaggtccgtctttgagtgtcgaatgatacttgcatcttcatagttaattataagatgtcagagccgtaagtcaaatttcatgtttaggtccttattctaattctgtgtccaaagagtagtataaaaacaaagtaggcctggcatggtggctcacacctgtaatcctagcactttgagaggccaagtcgggtggatcacctgaggccaggagttcgagatcagcctggccaacgtggcgaaaacctgactctactaaaaatacaaaaattagctgggcatggtggcggaggttgcagtgagccgagatcgtgccacttcattccagcctgggaaagcgagactccatctcaaaaacaaacaaaaacaaagtagatgtttagttatatatttatattataagagaatcactgctattcattcttgccacaaacatttgagtgctttctatgtacaagaactgaattttctttttttttttttttttgagactggatctctctttgtctcccaggctggagtgtagtggcacgatcacagctcactgcagcctcaacttcctgggctcaagcgatcctcccaccttagcctcccaaggagctgggagtacaggcacatgccaccatgcctgactaatttttgtattttttgcagagatgatgtttagccacattgcacaagctggtcttgagctcctgggtaagcaatcctcccgccttgacctcccaaatttctgggattaaaggcatgggccaccgtgcctggcccaagcactgaatttttattaatgtaagagatttctttgtcttttttttcttttttttttgaggtggagtcttgctctatttcccaggctagagtgaagtggcacagtcttggctcactgtaacctccacctcccaggttcaagtgatcctcctccctcagcctcctaagctgagattacaggcacatgtcaccatatccggctaatttttttggtatttttagtagagacagggtttcagcatattggccaagactggtcttgaactcctaacctcaagtgatccatctgcctcggcctcccaaagtgctgggattacagatgtgagccactgcgcccggccgatatttctttgtcttgaccgtttttttttttttttttagaagacagagtctcgccccgtcacccgagctggagtgcagtgacgcaatctcggctcactgcaacctctgcctccctggttcaaacgattcttgtgcctcagcctcctgagtagctgggattacaggcatgctacaccacacctggctaaattttgtatttttagtagagacggggtttcaccatattgaccatgctggtctcaaactcctggtctcaagtgatcctcccgcctcagcttcccacagtgctgggattacaggtgtgagctactgtgcccggcctgtcttaaccttccgatggggcctatgtgtttaattccaaacatacaatgtaggatgattaaatcaggataattggggttatcccatcacctcagcatttatttcttctaagcatttaattacagatcttagaattgttagtggctttagactctttactttgtcaaatgagaaaaacaaggcctagagaacctaagtaacttgcctaatgatttagaatccagaactgctatgtctctaccagtatatattttccccttcacatccttcactaattgcttaagagcaaaagtatgcagttatggccgggcgcggtggctcacacctgtaattccagcacttaggaaggcagaggcaggagaatagcgtgagcccaggagttcgagatctgcctgggcaacatagtgagacctcgttctccaccaaaaggtgggggggtggggaagacaaaacccccaaaacccaagtgtaactacctgcaaaagtatgcatttatacatttcatctaatatatacaaatattaaatatttaacagacaccaaacatttaataattttgcttgtcttctccagcctgagaaaagctttgacagatgtcctgtctctaaaacacactcactggaagcttgagtcgttgctgctgggtcctcttagtaagtttccttagaagcacacagaacatttaacatgttctctatcttgggagtgctgttcaaaaagcagaagcagcccaagggcatcttcttttgccaccaggtggcacgcttgtgaattgggaactggtggaaggaatgagtcaaggtgagggttgcactaaaatgaatctcccagctgggcaatgttgaggaatctgagtggggaaatgcttcattgcagagaatgaagtctgtctgatttgcccagagatcacaaaaataaaagacagaaaagcagaacatgaaaatgctacaggaaaggtgggatcggcacaaatgataccttggcactatgtccgtgtggtttaaggcagaaaactgaagggctgacttggccctgaggaggaaactactcagtagcagaggcaggaagggcccaaaccacaggtgaatccacccaggttgaacgcccacacagaggtgtgtgggtggggtggggtggggtggggtggtgcagcctgactgcctccgctgcaaaggatgtgcctttgtgtgcagtgtgacatccctctctagccttggcgaacctgggaaacacttcgtctcacatgtccttggaaatgtgggacccacatgtaccatgggctcctttgtaccactgagagtctcctgaaaagagtaggtccaaaaaaaggggggcttgagcccaaaatgggcttctgcaccttatggacacatgcatcagctcctgggcaggtcaacttaggagcccttctagtcatccctctggctatccctcccctcagttccttctttctttattgccatcttcctctgtggatgttcatctccccaactcttcattctgagccttctggaagcaccctgtgtcttcatgctgccatcaggcactgtcccccacactcactgactccgagggtcctccctccacctcctcccccaaactcctccctgacaccagccagtccccacagttgctgctcccccggcagcacgacaaagctcccttcttccatgtcccacttctgccataccaatggccgggcctgcttctgctgtaccagttgccaggccctgcatctagagatcctggtttgactactgtgggcaaagctctggtggttccgacatgcagctgggattgctaatgagtgtatgagttctatgattgtttctcctcactgctgtcagtggccagtcctgtgccctggagacttgagggtgggttccccatccttctctgctccccaacctactaccttgtcctgaggttctagtgtccatctattttgccattcaaagtaatggcaaaaaccacaattacttttgcaccaaccttctatagaaggccctgtgcactgtctgatctggaatttcctggttctcctttagcagtggagtcattgtcatctctatcctacttcagccaccctgggccttgtcatttctccctggcccctctgttctttgtagtctccactccctccctgggggatttcatggacaccactaccaccctctgtgtgccagtaagactccagagtatatctgtggatataccccacctcctgcctccagtttccagaacctttttgctgctgcctgctgggccaaatgcctcaaaatctgttttacccctccaatctattggcaccccatctccccatcatgtaagacaaaaccagggatatttttctccttgcttcttcactgtccagggccagcccacccaaggtcccaggctcacctggcataaagccacccctccccttcatcccaccacctctggttgatgccctcatcagctcttttctgggtcgctgactggttgtctcctggctgacctttctccaattctgttccccttgcactgtccttcactgctcccagaggagtcctcctaaaacatacatctgcagctcacccccttaccatgacggaggaggcctccgggggttctgccctctgtccctctctagcctcacaccggcagcaattctgaatgattttgtgactcctaggcactgactccactagttctgtgatatttggtcttgaatgtctctcccttctcccctgacccaagtgatagacctttctcctcttctacccctcagcctggctgcacacatcacttgttttgagccctaggaatctttttctgagccttctccacttgcccactgccttagtttcccagctcagttctacataatactctgccctgttttagcctgtacttgcttcattgtatggtaattatgtgagtctgtcttccccactgggctgtgagccccttctttgtattcccaggccaaatgataggagctcaattcccatttcatcaataaggacacgttacacaagtgcttgctttgttactgatccagccttgtttgccattaattactgacactctagctttagctttatttctctgttctgtgattcccctgtgtcaattagttcatcatctttagaccaaccttgaaatatacttaaggagctacttaaaaaaaaaaactaaatatgctgtaatgaagtctgttattttgtgaattttaaatggctaatcatttttaaatggtatagtgctattgcttgaaaccttaaactgtccaaattctgtaaaatcactaaatatcatgtacataatacagtactgagacctggcatgcagatagaacatatctttaatttttaaaagctaaacagaaatttgcattgtccaaaggaactggtttctcaggcctggacatgggaatattacaatgaaaggtaaggaggagatgatgtcaatcagttacctatcattcacctcatgactaaacctgagtaggttttttctttttcttgaaatggggccttactccactcctcaggctggagtgcagtggcacaatctcagctcactgcagcctcgacctcttgggcttaggtgatcctcccacatcagcctcctgagtacctgggactacaggagcgtgccaccacacccagctaatttttgtattttttgtagaaatgtggtctcaccatactgcctaggctggtctgtaactcctggactcaagtgatctgcctgcctcggcctcccaaagtgctaagattacaggtgtcagccaccactcctggccctgagcagattttaatcatgagttctgcctaaataattgctttaatctctgtattactggattaaagatagatctgaacttaagagaaagtgtgatccgtccaggcatattctcaaacttttccatggaactacttttaaagattggaggtaccactggtttgagtgggacatttgggaatatgtggttgtaaagtaattcagtttcttcgaaagctcatttatttcctcctgaaaaaaatacatttgattttaccttctatattacaatatgtaaaacaatatgaaagactgtttaaaattatttaccactgagtgaaatcaaccttcaagaagactcataatcaactttgggaggccgaggcgggtggattacctgaggtcaaaagttcgagaccagactggccaacatagtgaaactgcatcgctactaaaaatgcagaaattagccgggtatggttatgtgcccctgtaatcccagctacttgagaggctgaggtgggagaattgcttgaacccaggaggcagaggctgtagtgagccgagatcgcgccactgccctccagcctgggcgacgacagagcaagaccccatctccaaaaaaaaaataaaaaaaagacttacaatcaaacatcctcaatgaaaaagcattgctctgtagggtgatgccacaaattatttaaccattctttcctttctgcccctttgcatcttctgtactgtagacattccttccccctgcacttagcaggtggtatattcctggcactggacagagaccttactttggattgtgagagctcacagtttggttgggttggggtccccataggactagcttttcctgatgctttggacaccccttcatgctttgagaactttgtcttcgccttccttttccttgaatacacatagaaacacatacacgtgcaaacacatatacaaagtcttcctggctcagctctcccctacaccctttcatggtccttctgggcagcacaggcctgtagcacgtgtgtcacctcttgatgttttatttcattagcattatgtctttgtctgcacaaggctgtgagctcccccatgagcatctagttctggttacacagtacatgcgtgatgaaaggtaagactttaatgacgacggtgcattgagctccccatagtagaacagggacatttttgagattctctgttgcatggcttcctttggttcatgtgggtgattcagagttgatttagtctccccactgctgggcaagagtgttttgaggacttgtgtggttttcactgagctcatactccccctcccccatctgcatgctatttccagtatcatctctttgtttgtaaagcctcatgggtgttgtgggcgattactgggatccttccatcatggttttcatccagtttattcctatggggatataaaagtgtgtcagaaacagtataatatacaaatcattagcttttttattacgaattgtggttaaacactatgtgaaccgaagagtagttgaactacaatgcacaggctctgccccagtcacagttcttcctgctctacttccccaaaactagaataggcctaatgtggtgggttttcttccccgccattattttgtctagttccttatatttgtgtccaaaagaggacaggtttagaaaggacttccttacttttaaccgcagctatcaatccagttgttggagctttagccttttgtgaaggatagaaagaccttgcagtcatggttgacctgggccagccactgctgaagttgccggggagaacccctgagctccatcaacaggtcactcctgcttccacagatcactgcacctagaattgcagtctcaactagtctgtgaattgacatgttaaaaaaatactacaggtatgctttgaatattttatttttacgaattgtggttaaacactatgtgaactgaagagtagttgaactacaacgcacaggctctgccccagtcacagttcttcctgctctgcttccccaaaactagaataggcctaatggacagctaggagatggacagctgcctatcttttgatggagggccaaagcctcttctttgagttttggttgagtgatgggctttctcaggaaagttctgagctgccattctttccatacaccacacccacaatgcagagtctgtgattccttatttctgtgtccttaaatggagtacttgtgaaacaatccaaatgcagaacccacgccaagtttttgtaaattggaggccctcctccgatctgctaatgtttgcccacatttaattcaatagtagactttctttagttgagcgacccatataaagcctttcttagttatggaagaattagcagctttctccccataagcacacactcatttttcaccaatttccataatgtgcactttatacatgtaatttatacataataaaatatcgaatacaactcccataagcaggtttggggataaaaccagatgactcatggtgtgagcagaagagcaaagatacactagagaagaacttaatagtattggacattaaaaatgccttgggcagggtcagtgtggtttaaaataagagcttccaggtctttccactcagagagttaaaagaccttttcctgccaatgcttatttagtataagctcaactgtatagcaaaactaaataaaaatagtgaagcaattaattttttaatgacatgaattaaaacaacattgaggggctcacagaggctaataatagaggccagtgtgatcagataaaaaagtgtcaagatagctgaggcaggttttaggtttagccgggccttaaagaattgttgagtttttaaaacattaattgcagtaaaatacatgtaacttaggatgtactatttttaagtgtcccaattctgtgtggcaccaagtatcttcacaatgttgtgtaaccatcactactaaccatttccagaacttcttcatatcccaaacagaaactctacttattaaataataactgtccatcccccactgtactccctccccacaccttaataacctgttctactttctgtctctgtgaattagcctatcctatgtacgtcatataactggtatcacacaatatgcctttctgtctggcacatttgacctagcatactgtttgcaaggttcattcatgtgtggcatgtatagaatgttactttttttttgtggggggggggggctgtgtaatgttccattgtatgtatataccacattttatccaagttattggaccacattgggttttataagttattggaccacatttgggttgtttacaccttttggctatggtgaataatactgctgggaacattggtgtacaagtatgggtttgagtttctgctttcaattatataggttgaattttatactgctagtgatgagggagacatagcaagtacctgaagaggttataagccagaggcatttcttttattttgagctatcactgaaatcttgcattgttgactcttcgtaagtgtccgcttcctcctctatgctgtttgagagcgaaggccattttctaggttcagcacttaccaagtagctgggataagtatttactgaataaatagttcccggagttcctagcttaaagccgtcattccttatagtgctagttggtctccagagtgttgggttttgccacctatcctttttttgggttaattaattaacatgtgttcagggaacagaaaacaactcttaatattagccttagccaaacataatttgggaagtacatttgctaatgcaaaaagtcctggtgtaaataaaacacaattcaacaaacatttgttaagaacttgctgtctaccacgcacatttcaaaatttggaatttcagagcaatttcaaagctaagttggaatacctttttgaaaggcgttctcttaatacgaacctctactcttttaaaaaaaactttgtttttcaaaaattgtgagactactataacaatattaaagacaatttaaaaaagagaataaacattacagtcccaccctaataaaagccctattttcattttataatgtgagtttataaatcatttattttgaaaataaaaccctgaatacttctggtggcaattattttaattattttttaaaactctagaagtgaagcatgaactcatgatcttgaatttagagggcccttatttggagggatgcatggctgtttgacttgatgaagccaagcttttcttggtggagcagcagaattgacatgggtcatcttttggggatagatctgtagactgttgacatctgttatagggactgggtgtttaggagcctgtcctgtctttattctttcatatgttcaggattgaagaaaatgtttttattactgtgctagagggaaaagtacgatttaggatccttacctgcaggatctaagaccttggagtggatgtaggagatatggacacagttgaacatcagtacaaggcaaatgagtgatgggctgcctctgttggtgggatttagtgaggacaggttatcgcaacatggagtggctagggaacaacatccatgaagaggctgtcttcagcggggctttacacaagacaagatgtgtcccagggacacaggcagaagggatgatgggcatgacaacggatgaagaatgttctcaggatccttagccagtcagcctaaggagaggcaggttgggtccggggaaaacagctagaagttaaccccatggcagttcctttaaagttgtaagagctgctactgttagctgctgctgcctctgttgtggttttgaggctggggatggaattgttaaaaggatattgttttaggctgatggacctcagagttttgagggaggatgagttggggtggggtgggtggcggctggcggggagtcttttaggagaggatattacttctgtgaagtagttggctggtctcaagtggaacagcaggaatggaagggatacagggtgtgtggagggggctctgaaggaaagaatgctaggatgtgctgcccgagagggggaagtcaggtaggaacatgtttggcagatgatggaaactcttcccatacataggaagtgggtgagtccggactgatttggaaggccaataagaagttccatttctggaataagtgtgcctaacatttattatgtgttttccatgtaccaaaacatagttctaagagctttacataacagccttataaaataagtactgttagtatccccactttacagatgagaaactgagggcagagttgagtaggaacttgcctcagggttacacactcagtggcagagccaagatgcaagtctagacagtcctaactcaagagccaggctctcacttggtatgctaaaaggctttcctgcttttctatgatagcatgtattaaaaactatccagtcctgttttaatctccttacatgtgttacctcacttgattctcagaaaaactctatgagatgagggtatttttatcctcattttccaggtgtggaaacttggacacagagttagggtgatatgcctatgtcacacagctagacttagctgcattggcctggtgtgtctcaggaagtcaaggatgtttatttgactggattgtaattatctatatccatcagatcaacccatgagaaaatggaattgattgaaatagattgcagtataaattctttaagaaatattgggtcaaatttgctatcaatatcatgcacattcattgggaactgttcttttttaaaaggaataaataatataaataatagcatctctattgctgcctctgtttttattatttagtgctctgtacaactctgaaaataatcctggccactgcgtgcccatattcttgctgccacatttagatgctgcacctagcggactcaacgtctcactctgtagcctttatgacgttgttgctgcctaataatatttaatgcttataattggacttattgtcttttgatctggggtgtactttgcttgacataatggggctacagttgatgccaccacaggcaatatttggctaataaacaggaattgagactggtcatctatacacacacctgcaggaaacaatttccaccctcctgtaaagcaccttcagtctgtccctacccacaagtgctcttctttctatctcgcatgtgagggggtctcctgttttctttacctttaagcctggtttggctacagatctctatttctgtcttgtactgccagaactacccaagggagaggtctgcatttgcagcttgtagccctggagcaaacaacacttcccactcaattgaaattgtactttagaatttccagcagtctctttgtaaccagattaggggtcttttgttcattccctgccatcttactgtggcatctgcccttagagccaccaccctctctttgaaactttgtactgcattgccttctttgccacttagcctctctcccttttcttcctggtggttctttttcttaaatctctcatgaccctttcctacaccgtcttggctggaagagccctttaagatcaatgcttggttggttcctcaaacccttttctttaatgatctgatcttgttttttaacttcacaaggtgtcactggaccaccatcatctgaattccaggtcataagcaacccactgctgagaagtcccattactggccaggttgtacctgtgagcaaattacacctctcacgtcccctcccctcagaatatgcccccatcccctatcctcacccatcctgaacttgtgtggctcactcagatcagtcctcatctgcaaccttgcatatggtggcaggggacataaatctgatgtgcatgaaccattcccttcaccattctgcaagaggtgactgggggccccagggaatcttgttatcacactgccccagcccacctcacctggggaccttgccttctgcctcctcactgaggtcttccctgagtcaaccttttgctttttcatcccgctgatatggccttcctctgacaatctatagtgtcttttcctgtttattctgaattccttactgtaggttctcattacttctgcctgcgaccagcatgtttcactcatttccttgaatctagttgattctctgggatctcactatgcatgtcacttctctgctgaaaaacctaaattgaatctacagggtccctgaggtacgttcccagaatttacacccagaagttcaggacccttgatggatctggtttcactccacgtagtttcacctgtcatgtgctccgcaaggtaccctgttttttagccaggctggtttctgaataactctagaggctctgtgctcacttcactgccagttcatgctgtcatcttctcctcctcctcctcctttgcccttatgatatggttacactccagcccacctcttgctttttcttcagattgacagtaaacctcatagctatgttttacttcagtactttgttctattgtttttagagagacagagtcttactctgtcactcaggctggagtgcagtgttgcaatcacagtttgctgcagcctcaacctcctgggcttaagtgatctcccacctcagcctcccgcctcagcctcccatgtagctgggaaaacaggttcccactaccatgcccagctaatgttttttctagtttttgtagatgtgttgggcggtgggggcgtctcactgcgttgcccaggctggtctcgaactcctaggctcaagcaatcttcccacctcagcctcccagagtgctgggattacaggcgtgagccacggcacctggccagcagtttgttctttaaaccctgaaatgtatgtgaggaccatgtgtcacactagcatggacttttccccagcatctagcatggtgcttttgtagatgataattaatgaataggtatttgaatacatggaggcatgcatggctgaatgaagtggctgttgtaaaatttctagggttcaggtttcatattcagagcctaaagtttgcatctttataaactaaatagtttcctatctaggaaacctatttaggcattagggtgttaaaacaggtgtatcattttctgccttagtgtttagagatttgtgaatagttctccttttgatgaacattgccatgtaaagagagttatacagaaataactgaattcacacagttttaaggaaaagctattctatgtcatggtcatgtatattctgccaaagagagtgacaggccagtagtttcttttttctttttccccatagtgtgagattttgtttctgttgtttctaagctgggtgtctgcatgtccacactgcgaagatggcccatattcagaatgaaaacttgacccaattgtatgtttagcccagagaaggctggggcattcagcacatcctggcttggggaccaaatgtgaccctcaggattaattgagggttggagaaaataattttatagatgaacttaagacattttagacagaactctcttttcagccataaatagcagggcagctttgtcctatttttattgtagagtacacagaagatggaactcagtattggaagaagtgctttatttcgccaaggaagaagatcatactcaacacgattctgtttttcttggcaggctcttctcaaccatctgtgagtccaggggaaccgtctccaccatccatccatccaggaaaatcagacttaatagtccgcgtgggcgacgagattaggctgttatgcactgatccgggctttgtcaaatggacttttgagatcctggatgaaacgaatgagaataagcagaatgaatggatcacggaaaaggcagaagccaccaacaccggcaaatacacgtgcaccaacaaacacggcttaagcaattccatttatgtgtttgttagaggtaaatgcttggctttctgcagtgctgtgctttcaagaatttaatatcctgctcttaattttggatgacatatggatgactgagccatagataaaatatttctggctgggtctagaaggcctaaaacacatgtttcttcactgttctctcccatcttttgatatgatacatagtggctttgggtatggccccagctggaggactgcaggactgtgatactcttcctaatgagattacagtaggtttagcccatttgtgctggtgctttgagtaaaccctgagaatcaattaggccctttgggaaagctgcattttaatgccttgagatactagatactcccacttagtaaaaacacttcagggagccgaaggcctctcaaagcctaaccagaccgacacttcgaaagatgtggcccactcttaaggagtaaatttcagaaaaataatttggtcagctaaacatcccatgtctgtcatgggttctttgtagagttgtccatagaaaaaaatgtgacctcttataaacaaaagaaaaataaatatggtagttggagttctttgctttatttcctatgacaagttcagtgatttgtctgtgattttaatagccttttcaagagtaagcatgctgggcaggggtgtatcttgtagttgatgtaaaaactgatccactggcagcttaagggacatatccaagtgacgggaggagaaatagagttctattttctagttctgggtgcccctggactggggctgtctttgaaacaggcctgagaggccttatccatggtattgtgaatgaataatggatacttttattctagattggagatcttaggtacctcctgagttcagttcctcactacagtatttggataagatgatctgttctgtcttccttacgtaattgttagggagccaggatggtacaaattctaacatgctccatcaggagcgaataaagctgactctaaagtttgactgtgcctctccgctttatcagttgtcctttccgaagtaggtagctgcaaagagatataccctggtaagtcaccacttcgcctcagggcatgcttctgtgattgctgagctaatccatgtgctgttctttacattcaggaaggtattttgcaatttccaggtggcaatgaagtatcatgacaattgaataaatgaggaaaactgttgaattggttaaatcactctaacagggctcacaaacattcttcatagggaaagtcatcttctgtatcttggaactatccttaattataacaaatgtaagatgtttgaatacttaagtaatctctgttacagcaatgaaggaaggtggggcatcattgtaggagctagactcaagtgacctacaaagagtagataaaacagtaactagctatggcctgggaccatccatagttcaaccatcatgaggtcatttatttgcagaataaattagtaaggttgggagatgcataatttatcttggaaaacttttttttcaaaattgatcaaggataaaacacaaacctatttcaatgatgtcaagttcattttgtgaaacacctgagtttcagatggaaaggacagtttaaaaacagattttaaatgtaatctgtgggcctaaacatgtatctgtattatgacactgtagagagtggcagcatattgtgtatacgaaattaggtttgtctggcttctatgaggccccagtcagcctgagccactccgagtctgttcctggtgtcctgtcataaacactaatggtgttcactttcactcacaagtgtcctggtgggctatggtatttgccacagaattcctgaaactcacaagctccccttgtgcatttgaaattatttgatttccagaagctacatttacatgtttcttcagaggaatatgaatcaagtgagactcacctatcatgggtactgggtggcctggtgagagttttctggattctctttagaagccgaaagactctggaccctggaaagggtcctgcaccaagtggttagaaggaggaagcctttcctgctctcactaggaatcatcacactggcttattggcagatgatccctggagttgtaataaagttttcccaaagttttaagagctcaaatattgctctctgttggacttgggtttgagttccaatcagccatttccaggtcatgtcactttaggagggttgcttttatgacaccgcagtttcatctatgaaatggcaataataatagtactgatcatgggaggggcaatttgaagattaaatgagattaagtgtaatggtccaagcttagtgcgtgatacatggaaagcgtttaataaatgttaattctcaatagtactagatggataaattttgcttttgtttacacagaaaaaagcagccatttgggccactagtcatgaaaggcaacatattagatcttttaaaaagtgttttcagtgtctgtgaccagccattccaactactgattttggatatgcttctatagatcctgccaagcttttccttgttgaccgctccttgtatgggaaagaagacaacgacacgctggtccgctgtcctctcacagacccagaagtgaccaattattccctcaaggggtgccaggggaagcctcttcccaaggacttgaggtttattcctgaccccaaggcgggcatcatgatcaaaagtgtgaaacgcgcctaccatcggctctgtctgcattgttctgtggaccaggagggcaagtcagtgctgtcggaaaaattcatcctgaaagtgaggccaggtactggctctttcttatctgcctctgggagttgagaactcacttatctaaagaagacttctcttctcgttgatccaccttagtgtagtcaatcagggagctagctgttcatagttcccccagcttcaaaaaatgtcatctgcttttgaatttgtttatttcatggtcctgaccccgtgtggcagttccatgactgcctctcatagaggtgaatgtatctgccatagattggcatttagactggactgacttaagtcagcccaaagtttcataattgcatcaagtactcgttctaagggaaacccattgggtagcttgaattatgttggttgaaaagattagcatgcagatgattcattctttgatttactattgacatatgaattgactttcccttcagctgatcaattgcaatgcatcctcaaactgtttgagatctgagaaggaaaattccagttgactgtggaacttgttatggttgtgccgttatgtagaatatttcgttagctggaagataatctaggttttaaatctcagagatcatctaattcaacaccagttggcattcagctattgagtacagtttttattaaggcttttgaaaaagtatacttattgaaattagggaaaatttgattatttaaaacctgggatttccagaggtgagcagggtaggatttgcatgagaaagacgcctgtttgcttaaaagaatataagtagttgttggtcacatcctcctgacaccatcaaggttgtctgaaataaagattaaagcagcttctctatgctagggcttctacttggtttggaaaaagtgttttccagaagtattataatctcacagtgggcatttctgtctttttcactcaatttacttgaaggatgcttgatttaattgctggtaccttcagatatgcaagtagtacagataggttagcaccatgctttgtattttatttaaaagatgacaaagtaagctgtacacatttgaggagaaatggtaaatcaaaatttcatgctataatacaaattatttgaggggccacatttcttttcattctagccttcaaagctgtgcctgttgtgtctgtgtccaaagcaagctatcttcttagggaaggggaagaattcacagtgacgtgcacaataaaagatgtgtctagttctgtgtactcaacgtggaaaagagaaaacagtcaggtgagtgaatcgcttcattcttctcatgttctgtctctgtgggagatgataagttttctctttcagaagagtctgtcctgaaactgcctcgactagtgcgtctgtcagaggtggattgtctgggagagtgttgggattgcatatttccccctttcatacctccacatggagatatatacatttattattagtaacaaataaatttcattttatacatttattttgagaaacttgagagaacttcagattcatgttattacttcatgctgtttctttgaaaaactgttagggacttaaaaaacatggttaactgcatgaatactttgatttaaagctattgttgataccgtttaggccagactatttaaaatattgaaaagagttgccacttccatacttaaaaagaatagagagtctcaattattcaccagaaaacccttccctcgcccacaaattggcctatccatttgaagatgggtttctttttgtaaggatctgatttcctcctttgaggctggttacctgagattaagttgctaatggttttctatttgttttagtcactattaataaaactgttatccttaatctgaaacatctgggcatgcttacgttcccattcatttaacaaatgcatattcaatgccattatacctcagatactgggttaggcatatcttaaataaattttagctagttactgaaattttatccctactaaaagagcagagtttttacactgtcttaatttccaaatactttgctttaaacttcccattgaccaagttttcagtaatttttgtttgaataatcttggccatctagttaattagctatcacagtggtttttattcattacccatgcaagcattatattggaaaaaagaaatattatattttctttctcctcctcttcctcctcctgccccatgttcaacattggcaattttatgcctgtttaaaaaactctttgctaaacaaataaccatggtgattgccataatgcaaagacagtgtgatgatattcatgtagacctgtgatggatgatatcttgctaaatgaagcctgccattgactggtagaatggattgtaccatagacttattctttcaaaccaatgactcagagaaacattttagtttttgtatcatataatgtaatacaaaaatagcttatgtatggatttttggctaaccttacagaatacaatctcatattaattggctttctataatccttgatttcagatgagagaacaatttagaccgggtgtgcatttgagcctctgtataacttgaacattatccttttttgagatgagaaattaaattgccccaggcagttttgttctgaaccatttttcccaggagccctgcatgccagtcccaattaatccactggtgctggtagataagccttcagtgttaggagctctttggggaaatcccagtgtgcacctccaagggttaaggaaaaccaaatcacgtgcaaacaatatgtaatgtgtgacttgcagatggggctcatggctgtctgccaaggttcatccatgaatcttttattgatatcttttggcttaatttagaatactattagcactatcaaattattaaaaaatccataatattttattctgaccctttggaataagtttaactcacaatgtaatttagggtaaaatgactttttagcattgttgccattgtttaagcgcaagggagtcttggagtttgttcaatactgttaatcttagttggttagctttcttaatgcctctaaaccctcacatttttacttgcttgtaatcagaatctttgacagtatcctaacttatgggctttgggtttggatgttcatgctgcatctcttatgactgcactattcctttcagcgctgacaagttcagagttcctgtttgagttctgttgtggactcttgggctcttgaaagaactagaaggaagataccttaaattgagactttgatatgttatctgtccattgtcactctgcctttgtggagaagtctgtgaaactatgaactgggaaaagccagtttgaaaatgttgcttcaccttgctcttacatcttcttgacaattgatcttatgctgtgaaatggtagatttctgccaattattagaagactctcttagaagggggtagtaggaaatctacatagtgttacaaactagaaaagcctttaaagatagttttgttcccacatacccttttagaaactaaaagttaagactagtgatgctcttgacttacctaagatctcacgattagttaacagcaaagcaggtttctgttctttttagtttgaaacattcagcttcagcagtcaacttttgtgtgtggttactttaatgtaaaaatatttgtaaaaccttaataacattaaaaaataggtataattccaccgtcatagatagcaatgctgtgtaatagaaatacatgaaccttatatgtaattttaaattttctagtaggtacattacaaaaaataaaaaaggtaaaattgattttaataatatattttatttgactcagtgtgtctaaaatattatttcataatgtaattaacataaaaattactaattaggtgttttacatttttttaaatataagtcttcaaaatccaggacatattttatatttacaacacaacttactttggactaccagatttcaaatgcttagtagtcccaagtgtctagtccttataaatgctatatagtctgcattttttcatattttttctcttttcccctatgcatatgtattatcagataattgcaattttaaggtacattcaatttgtgctttttaagtaggtaaacacctctcttatagtcataatgctatacttgatatacatttaggtcgtttctgagtttttaccacaaccaacatattgaagcttttattttctgttgagcaatttccttgagttaaatttgctgcagttgatcagagggtatgaacatcctggtaagctcctttccagaaggatttttctgatttataatactgtcagatgctttaactctattaggtttaccaaagcctcgccaaggaatcacccttgatctcattccatgtcactattagctccttttactttaattggttgtttttttccccattgtaataggagtgtgtgtacattacagaaaatttggaagatgcagaaagctatattagactttctttaatcttttcagaaagctgctgtagcttatgttatggtttccccatgactttttaaatacaagaaatctctccatgtcttgtctgcagacaaaaaatgagtgagatggtgatatcacaagggtaaattcacaaccttttcttttcagctcatgcttaaataatttgggccttgttcttagatgtctcttataccttggaactcccttcagtagtttacaagattctgctgggtgagaactgcaggatgagtttccaagctagttgttgacattgtgattctgttttcattcttgcaaataataaattttaataaaatagaacattattgttattagcaatgtgttcgctctcagtcattgggacatagaagagaaaaagacatgacaaaaatatgctgactcatattacaaaatatcagtatcccataatatttcagagatagcaacttttaaaatttagcgttgtatagaatttggaattatacatactagggttaagaaatgaattttcgtttttttcccaatcgttaataatgactgtctttcaacataatcctgtaatatgaagtgttccaatgacagacttgtcatgatgctttattattcttacttaagtagtgtataatgaaagttaatatggagaagttaattgctgctatttttaatttatctaggaaagattctgaatataaattatatggtaatcttcatttttttttctccttttctgaaaccagcagactaaactacaggagaaatataatagctggcatcacggtgacttcaattatgaacgtcaggcaacgttgactatcagttcagcgagagttaatgattctggagtgttcatgtgttatgccaataatacttttggatcagcaaatgtcacaacaaccttggaagtagtaggtaaatacctctatgggaatgtttaaattactggcagtagtgaaagaagaaattattagacagtttcttttttatgtaaatggaatgttgaacagattcttagaattttgttatcactgaatgaatgaaaattatccttgtagcctcttgcaatgaaagcacaaaaccaaattctaccagtttagtggaggaaagtggaaagctgttactaaaattgttcaaacctattattctttgtgcacctcaccctcctttccccaccaaacaaaacataagttgagatttttcaaaaatgctagtgctcgctgaatgacttgagtttggaaatggatgtagaatttatcaaggaacacaaatgcttagagcctgaagtatttctctgaaacttttggtaggggctgtgccccttggtttattgttttgccactcatcagatctagttccttctagtaaggactgaattggacttttcctccctagtattccctacctccttatctcacctgttctctaagcataaagattatagcataaaccttcaggaaggagtgccattgggacacaggtcattggttctacggagcataaactacaacatggtaatctgtccccggaccccatcatatctggtatgcacaattggttcagccttatcttctctactctagaaatttcactaaatatttattttccaagcatctttatttaaagagagcagagcatagtgagtttcttcatgcttttgatttactgagaataataataattttaaaattactttgtttacaatttttttgtcttttgagtattgtttgaatttaatccatttttctgtctttttagtacaaccatattcctagtgttagactttcattaaatacttctaaggtggcaaaattcttgatcaagaacaataataaagtgatgcggtatttgttttcatctctttccccgcctcaccaaatttcttcaataatttatgtagcagtattaaagctttgtgattatcccacaataatctcgtaaaattttggcgtttctgcccatgttataatggaaagtttctccccagactgaacatggaaaagatactttacttgcaattatagtcagcacacagaaagtgtactactttgttcctaaacatgattgtgaaccatttattaatttgaatagaaggctatgcttttaaaatattaaactccataagcactaatttgctaagttgattagggagcatgttgatatatcagcttcagctccagaaagcaattagtaaggatgttttgagaacattgttgtatgtaatcggatttttaaaatccattcatcaatttccaagaattatcactgtatgactggaaggacttgtggctgtgaaacctgaatctggttttgtattgttttgagaatgggttgaggtggaacaggaacaggaggagacaaacagaaaagtaattttttagtggctgggaggagggtttggatccatgatggagtgatgaagagaacagggctttggtatcactctttttttaagaaattacttttttattgtatatttttaagatatacaacatgatgttatggggtacatatagatagtaagaatattactatagtgaagcaaattaatgtattcatcatctcacaaagttaccctttctttgttttttgttttgtgataagagctgttaacattttacctggttttgaattggaggctctgcctgtaatcccagcactttgggaggctgaggcgggcagatctcttaagcccaggagtttgaaaccagcctgagcaacatggtgaaaccccatttctacaaaaaatacaaaaatgagccgggcatggtgccacatgcttgagttgcagctacttgggaggctgaggcaggaggattgcttgagcccaggaagtcgaggctttagtgagctgtgatcgtgccactgtgctccagcctgggcaacagagggataccctgtttcaaacaaaacaaaacaaaagattaagtgtcacaattattaagtaaaaggtatgctaaagtacttaaagcagttcttaacacatagtaagcacataaatggtggccataaaaataatgttagcaattactttattgctctctttttcaagatcttttttatattattatatcaccttttctaaggactccattatttatttaaccggttttctattttgccattttatattataatagcttataatagtgtaaatagcacttttgtttttggcctgtagctatctatctcattttaagaagagttctcaaatggaaattacaagatttaatcaaggaatagataatttaaaaaaaaatctatattgctaaatgcttcctaaaagaattgtgccaatttacagtgtgtaattcagcatactacttttaccacacttgcaaaattattgagtttagttaaaattagttttgctatttttaataagtgaaaagtgatgtcttattttaattactagtttagctaaacattttttctacattttattctcctttttcctgttacattaattattttactatatagacttttaaaaatatttatggatttaaatttgtcttctatgatgtttttcttctgttgcttctaaaaagcctagaaacttcccctctgtagaaatttcataggagtcaattgttatttagttaaaaataacattttattgttaaaatgctctttgatttatctgtgatatataagaagacctaaggttatttttcttcaaatactaaagaacattctttgaacatttttattaaacattagggctcccttgttttcccttaatttatgacaccttatcacatatataattatatattgggtctgtgtatgaactcactatttattccaaattcttttaacctaataaacatcaagactagtagatttagaagacttttaagatggtgatagatctttaagagaattgcttaagaggcagagatgggagaatcagtatttcaaatgtgtgtcctttctcacttgtgacagtgattctacaagagcaaaataaaatgaaaaacagctagttaaaattctcttattgccaattaatactggaaatcaaccaattgtttttgtaattccaagatgaggttctgtttttttgtccagtagttgtagataatggtttctttctgtcttatttcattctaattagataaaggattcattaatatcttccccatgataaacactacagtatttgtaaacgatggagaaaatgtagatttgattgttgaatatgaagcattccccaaacctgaacaccagcagtggatctatatgaacagaaccttcactgataaatgggaagattatcccaagtctgagaatgaaagtaatatcaggtaagaaatggaccttgccctgggggattacacattacccccttttccagtgggcttatcagatcttatttctgtaacccgtaaatccacgagaagatacctggtaaagaagaaagtctggggctgcctcctatgtcctcatcctagtattccattttgttgtgtgtttagagcatgcacactcttgcacacgcatgcacacacacacctgtgtgcctcagttttctcacttgtaaaatggaggacagttttctagagatctgagcttagctcaaagcagtaactttcatgtactcgggatacagcaagtctcttcagagaaaaagggaagttagtacctataattgtttcttaaagctgtaagaaaactaagagccaaataacttcgcttcaggcagtgaacccatgttcttttacactagacctctcatttgatcctcaaaacattatagtaaaaatagtagcaatagtaatacttcaggtaagacataagtgctttttttctgaagcatggttctaagtactttacgtgtattcacccactgacctgaagcctcacagactttgtgagtagacattcttatttcccaccatttttatagaagaggagacagaggtacagaggggtgaagtaatttgaccaagaccgaacggctaataagggctaagtgcctggatagggttttgctctatttttccagtcaggactgttgactgttggaaaaatacgggtgagagatgatagcgtcctgggccaaggactaaaggttggagggaagaggataaatttgggaggtctccaggtgattgagagggcaggagaggcagggaggagttgaagatgcctttaggttgggtggtgagagaccataccattcagggagagcaggaggacggggagggacaagtttctgaggaaagacagtgactttgttttggggtttgttggatttgagattgatagtgggatcttgagtgggattgtttaggtaggaagtatcttttgccaaacgccctagaagcagagcctgagacagggattctgaggcaagtgacttatgcagggatagactgaccagggagtaggggaagaggcatgggagggaaaggaggcaagtaaggatgtggctcagatgaccccaagcctcagtcttatccaggagctgagcggggcttttgcacctctccagctatcagtcacttactggctgcagacctggctgcacggtcaacgtcttccaaggattgcgcaagggcaatccttgggagaatgctgcaggcaagtgtttgggggcatgaaagtagctctgtagaggagacatggtacagagaaccctgcgctggaagtaaagacgtgaaggttgtgagccagcagccagcagctcagtgtgagagagtgggctgcccagggagcttgcatagtgtgagagttggcacaccgcctatggcaagttggtgttgtggcccatgtggatcgtgtgggtcgtggactgcccagggtgacacatgtacatcggagcccctgccagtaaccccgacagggttgtagggtgctcagtgtacacagccctatatggcggtcctgcaagaagtcagaagcttgagtggcaaatactgccaggagcactgagaagtctccggggtggaggaaaaccaggagatgggggtgttgcaagaaggaaggtgagcagtgtggacctcgctgagggcccagagtgtctgtgtgagggcagtgagcatgtgcatgcagggcaggtgagttcaggacactgtggagagcaggctcctgcagcaccatgggcaggggaggaagtggtatgcggacagcccagggtggtggggggagggcggaggcgggaggcggtgggccagtggagaggctgcagcctctgtcaggttgcctttgtgcttaacctttccccactctgtggtctctcacaacaggcgttggtcccagatggaatatgtgtgtgcgtgtttatgtatttgttaatgtggattttgctaatacttactgaattaaatgagttatatttttcctcaaacaggcatagatttccaggtagaaactgaaaaagacatgccttccaaggcatgctatccacaggtgattgactagttgtcttttctttgtagatacgtaagtgaacttcatctaacgagattaaaaggcaccgaaggaggcacttacacattcctagtgtccaattctgacgtcaatgctgccatagcatttaatgtttatgtgaatagtaagtaacatgaagggctccttttaattttttattcttttaaagttgtggctcgtgtttgtaacagctgcaaggactcaacttgtgtactatgtaaataacgtttcatgataatcttgaccttcacagagacttcgtggtttggtggttagagtgtgtcaaaaaaccagttccttgtcctacatttcactgatcacatgaccttgtagaagttgctcaaattctgcgtgctgcctttgaagtaaacagaggagccaaacaagttgaacatacagttgtttgagggaaaatgtattattattgattgttggaatggggggctagtggttgaataggagctgaattactgcgttaggtagggaagagatgctatcgagccctgacgtgatttctttgttcagtgctgtctcttttgaggctgtgatgttacttgtgtttagattgttcttccactgagacaaatgcaatactgacaggcccatggctcactactgagtaccatgtggtatgtgggagaaggtagcagatggtttaggatgggagatggccatgggcacctgagcacccaagtcctgcactgctggggtcctaccgaccccactcctgcagcccaccatgtcttagagaaatgtctgctctgaagttgaggccaagggagcccgatcatgagctggaccttttgccaagtgcagggcttcttcctggctccactctgggccccgtgtgcatttccaaggaaggtgcctcccacaccatacctgctagtgcaagggaggcccctaaagactaggagttccaagggagtggcccaataaatgactattggaattggctttcctgggtgtgtggaggatgaggagacaactggaatatttcatagaaaagagcttaggcgttatgctgggcactttatgtgtgttgggttatagggtgttgtgggaacaaaggactggggccaattccttgtcttgaaggagcttactttctgtacgaggtgttgtggttttgtttttttttgtttttgagacagagtctctcactctctctccctgtctggagtgcagtgacatctcgattcactgcaacctccacctcccaggttcaagtgattctcctgccacagcctcttgagtatctgggactataggcatcccaccacacccagctgatttctgtatttttagtagagatggggtttcaccatgttggccaggatggtcttgaactcctgaccacaagtgatcacctgcttcagcctcccaaagtgctgggattataggcatgagccaccgcgcccagctagatgttttgtttgtttgattttgagacaaacatgtttttgttttcaaacatgttgacaaacatgttgagccagcatctgtctctgtcacccaggctggagtgatcatagctcactatatccttgtactcctaggcccaagagatccttccgcttcagcttaccaagtagctgggagtacaggcatgcaccaccacgcacagctaatttttaaatgttttttagagatgggggtcttgctttgttgcctagactggtcttgaattcctggactaaagcgatccttctgccttgtcctcccaaagcactgggattacaggagtgagccacaacactcaacctgtgtgaagtgattttacataattgtcttatttgatgctacagctcaggaaagatggtagggtgggtggtgtaagccaatgaaaagaaatagctggacagattttttattgctaatccagagtcttttgactatgaacatttcaaaaattgtgttttctgaataagacattcatatgagtttagatgaagaaggtcacattcgtgtaattaaacacatatctttattactggccttcccagaatcctaatatgctaatgtgactttgccagagggggccatgggataggatgtatatatcccaaactcgtttgatcacacagttctcccttttcaagggaaacattaattattatctgagttccagcaaacagttttgattacatagcatttctctggtcctcaattcaagtatctctagattaatttcaatgtgaatcagaaagtaatagtatatagaggctggacgcggtggctcacgcctgtaatcccagcactttgggaggccgaagcaggtggataacctgaggttgggagttcgagaccagcctggccaacatggtgaaaccccttctctactaaaaatagaaaaattcagctggttgcgatgatgagtgcgtgtaatcccagctagttgggaggctgaggcaggagaatcacttgaacctcaacctgggagacagaggttgcagtgagctgagatctcactgttgcactccagcctgggcgactgaacgagagtccgtctcaaaaaaaaaaaaaaaaaagataatagtatatagagcttagtgtattacccatggacaaaattacctgcttctgaaaagtcttaatgttcatctcatttaagagatgaccgtaggtaaatcggtatccttgcaagcataatatgcatattgttcatacagaattttattgtggctgctcttgtgtgatgcttctcaacctttctatgttaaaagactttcttttctaagattcccaatacattgtggatcaatacttcttgtaaaatatagtaaaaaccaattactggaaaagtgaaatgaaaaagaacaatatacaaaatacaagctcgggtttttttattttttagattcaatagatataacaattactctttgtcaaattgctcctcctcagtgcttcttctcagtttctgtatttatctcctgtgcaccagcaacagcagatcgtgggtggggcccactccacagacctcactttgagagttcagtggttgggaattttatgaagtgaggtactttgtgttaccactgtttccctggctttaagtccaaaggggtgtttaaatgtgtctcttttcttcttttttcatgcttccatttgccagtgtgtggtctgccagttggtcatgagatattgacctcaggaagatgtttctgacttttctctggtgggggcaaaattgctactaggctaatttgccattccagcaggctcagttttaatcagtgctgctggtgaacccatgcttatttgaaactagataggatatgttgttagccttccaaaaggatatcttcttggattgcctgtaagtaggaggtcttttctgcattctagggtatgggtctctaatacccacccagcacttcctgaggtcccactgtatttcactggatatacagatgaggatcatgttggtcctgacctcaagctcttcagaaagtcttttccttgaagttagtttgttacaaataacaaactgacagaggcatttatttcacttacctaacacgttggatttattgatttgcaaacgtttggacagaggtagtagcatttatgtttgagctttaaactgtctatgaggtacgtcccagttgctctttagagatatagttagctgatttgttgattttttttaattgaaaaaaaatctagttaacattattatgtggtagtatttttaaaaattttatttcaatagtttttggggaacagatgggttttagttacatagataagttcttttatggtgatttctgagattttggtgcacctgtcacccaagcagtgtacactatacccgtgtatagtctttatccctcacccccctcccacccttcttcctaggtccccaaagttcattctgtcattctcatgattttgcatcctcattgcttagctcgtgaggtaggatttttttcatgttaaattttaaaatcaaaagctaaaataattctacaattttaaacttagaatagttgtggcctttttgacatcattttagctgagccagttacatatgtaggtgtactgtatggtttattttgtaaataagctgagcctcaaggacaaaagggattgtgttctgcaaaaatcagaattgataaaaatcagaataatgaatgcatagtgtttgttagtgcagaaattcagcctacttttactctgtgacactaatgcgtaattgcttaatagattcatctgcaagaaatgctattgaaaatccttgatttggcatggttaaatatttggcggttgaaaaatctatttgttttgaaaattccacatgtaaatttcagtatagtgaatgtggggaaggggcatgttttaattgcttatatggtagacttttaaaaaatattgtgctctgacaatttgtgttaagaaaacacgtatataacatgttaagcttgaaaatgttctaatactgtttctaacctctctaatcaagccatgatttacatgggcctattaaactgactcagtgacatttaaggtggtttataatggccaagagccattataacatggttgccatctttgagtagaacttctagtggaaactgataggaattttcattaaaaaacaaagcaaaaccaaaaattagtgattatatctgcattgaatttgcattactctaattaacttttggaattgcttatccaagatgtgtatggacatcaaattcttagatctgaaatgtttgatatccttcagcgaaaatggtgatttgtttttcttggaaatgaaaatcaggaaaaaagtagagttttgaaaccttacctcaaagtgctttcttaatagacattaacctttccaaaactcttggaaatattagaaaaaaatgacattgccaagatgctatgggtagcttatgctacttatttaggaactgatggcctctttggttatattaaatgtcacacaatgaggtttttttttgccagatccaggacaaataaaaggccaaatatgcactttaatcctaatatatccatttggcttttttccccactccatctagtatttcttgaataaataacaaactttatagtggacttaaaggataatcagtaaagtaaatattttgtaggtttattttggcttcaattttaaatacccatgtgaatcctgaaataatttacataattgtagaaataaattatggttgatatgataaaccagttgtttttcaaacctttggaataattttaagaagatcctgtaaccttaaagtggatagttcaaaacatgatctggtagcatttccagggcggtattatgcatttaaaatatgtggcaaacggtatttacggatcataaatagatcccgctcccattttgaaagcttatcctttaatgacgagcttcagccagtgcggtgggagtactgtgatcctcacgtggtggtgacggggaggcagacattgagaactgaagggctccctttgatcattagccttacataggatgcctttaatgttgagctagattggaagcccaagtgactgctgaagtgcaccaaattaactcagaagtcaccaatttcactccatttatggaagggtattaacagggggttgagaaacaatttaaggaaatgttaaataatgtattatttccaaatcactgcatcatataattaacatcctacctgttgttagcaattatttataggtcatacagtataccaaaatcagccaaagcaataaatcacccagaataaggcttctcgatgagaaagatcccctttgaccaagtatgcaaagtctgggctaccttttagtatttttggttcacagttaaatccagttatggatggtggaaccaattctagggagaagctcctgcagataaagcacatagccatctagcttttggccagccaaccagaaatgatcccaggtagactatcagtgcatttgtgttgctgttaaaaaaaaaaaaaaaaaatgcccggggctgggtgatttataaagaaaagagatttatttggctcacatttctgcaggctgtaagaaacacctgcttctggtgagggcttcaggaagcttccactcatggtggaagcggaaggggaacaggcatcacatggcaagagaggaggaaagagagagaggagaagaagggtgccaggttgtttttaaaaatcggatctcgagggagctaatagtgtgaggagtcactcattacctctagtacagcaccaggctaatcatgaaagatctgtccccatgacccagacacctcccatcaggccccacctccagtattcaggatcagtttttaaacatgagatttgaaggggacaaatattcaaactgtatcatagacccgtgaaagccagccatatagatggcttcacctgtttgccagctctctgggtcacccacctggctggaatctccaactacctttatccagagtaaaataataacggcagtcttgcctgcaaggactgctcagatttggtccttaaggccactgtgcccttcaggaagatcctcacaaaacagagcaaagttactagaacttcaacttttttggaagatggcaatgtcttcccaccacttaacctattagctttttctttccattttttaaaaaaatagtaggacctttcaaacacatgcgcgtccaaaccatacttgtgttagaggccacaaatttgaagacttgctgttaatttttgcttgaaagtctttgcttttcagtgttttccccattaggtggatactattagcgtgacttcctcttatagtaaataattgtaaattttaaacgttaaataaagtgccgaatagaactcctttctgatttatttacttgcttttgagagtttgctctaaggctgcaacagtaactggaacatagcttcgtttgtgtgaacatttgtatgctgcatgtttttaaattaaaacaattttttctcattacaaaagcattatgtgaagggtagaacaattagaaaatgtaaataagcaaaaataaaaatcaagttttatttttactttttatgtttatttactttttataggttaccattactaatattctttattatacattcctccagaccattaatttttttttaaataaaaatgaagtcatattgctttataacctggatttttggtgctgcacaacaaaagcattgtgaatatctttctataacatcattttggcatctcagtgtatggatcttttataatttctctagcccatgcctgatgcaattttgagacatccaggagcgaggcgggactctgaaatgatgtgactgaattttaaaagaaacctgtcagatgattatttaaagtttataattatcgtgtttaatgtctaatgagtgaccttgcttaagtggctggaagttaataaggttatcatctgttgttatctttcatgctctgtgtcttcaacatacgatatggcagatatactgtgctggctttcaggacagttctaaattaaggaataattttcagatcttcttagtgtggtagctaatctatgtaaaaatcgttgcttgtcttttcacattaatctttttatagataatatgtgttcatttgagatatctgacagtgtttgaactctgtttgtattttctgttcctgaacttgaaatgagtttttgttctcaaattgcttgggaattatgaatgttgtttttgatgtgacactctaatatctctttctccttataaagagaatgtctgtggaggcaagaattgttatagatgtttaaattggaaaaaaaaagatataatggcaacctacttttaaagtagaacttgattctcttctgttctgaaaaaatttagcagatgtagctctgaactaagctaaacatctttccctcctcaaaggctggcatcattactcttcctccctatctcataagaaagttggtctggtggatgtgttgctaatttaggggccttgatgtaaacactgaacctgtaagagaaccaggtaaactctctggatccatagcccttggttgcccccgtttgtgtggtttggccatttttttatgttgatggtggaaaagcaggagaaacaggtttaggtatgtagccatgtaaacttctgctggaattgactctaaacttgggtacatagacttcgctaaaagcagtgagtggtcccttttatattgtggaacttccactctgtggagattttcttttcagttgagccacttgtttttacatcaaattagcttccttcatttacagatatatgcaaggtcacctgtaatgtagtgaaatttaaattaatccaagaatagggacataatgtttccatgggcattctgtcaatacccttctcctccacttctgaattatgttgcaaaatgaattagctacttttccagagtaggaaaaaagaggcttttgtcccatgcctgcactccttggcagcaagcagagtggcattgtgatgtgtgtacaggtcttcctccccacggctgggtgatacagcaatggtgctcctgtaagttgagcagtgattctggctgaagaagtctctctccaagtagtttcatcatttttcaacgtaatctcgtgattgggatatctttttgattgctgtttagaacaggggttggtagaactatagcctgctggccagaattggcctgtagcctgtttttgttttgttttgttttttgcttttgagacagagtcttgttccgtcgcctaagctgtagtgcagtggcacaatcttggctcactgcaacctccacttcccaggttcaagcagttctcctgcctcagcctcccgagtagctggtattacaggcacctgccaccatgcctggcttatttttgtatttttagtagagatgggatttcaccatgttggccaggctggtctttctcctgccttggcctcccaaagtgctgggattacaagcgtgagccactgcacccggcctataacctgtttttgaatggctcacaaactaagaacgttattgaatttatttctgattagttttaaaaaatcaggagatttcatgagacatgagaatacaactcaaatgttagtgtccacaaggaaagttttattgaaaacagccatgcctatttgattatataatgtctatgggcacatttgtactacagctgcagagttgagttgcaggaaagaccttatggcccacaaatctaaaatatttacctgaaatatgtatctcgccctttatagtaaaagtttgctgagccctagttgagaaaatcacttcattaagagaatgattttttttctttttaaaatgacagtcactgttaaaataaataggtacaggagattatagttgaagttttattttgtttgttaaataaacttctgttagtgtccatatgccaatttctggatatctttaagaatgtataagacacagtatatgtccaaaatatctatcctgggaattttttaaaaagtataatattccttttataagtaaggttatttttctactccaattttagctgacttaaatttctttattataatggtattatggcacaagtgtaggttttacacagaccaaaaccgggatagtgaaaaattccggaaaagcattgcttcattgcctttaaacaccagcaaacctcgaattttaaaaacagaaattcattcttatgatccctcttcatttagtcttttattatttggagacttaagtgtttgcgttttttgtcctgctgattataaaatatgggcaaatgtgcatttatagcggaagttggttaaagtggctgggtgagagaactctaatcaaaaaatgcctccctgcatttagatgaagaaaggaagaccccttctaccattggcttgtgtattgcctttcagccaccagccctcagctttgttatctgtactatgttcttaaaattcattttgttcttgctttccacatggactggatggtgatgaaaaggaatattttccaagatcacaaatctgtggggtaaatcactggatgtgtaggatttttaattgcatgagcaataaattctcagcagagttacaagcatctgaaatctgcctacaagctgatcggtgttgttggcgatatcagaatgactcaggtccatgatgtttttaaaggcaaaaaggctatttttttttatctccacaggaaatgcataacttatacacctcttaggcttatctaaacctccaacttgggaggaattagagaatgtgtcatttgctatactgcttattgcagaatatctaagaagccacagctcagatttaacctggagaactgcagagttatgtatctttaaaggcaagatgtatatttaatgccaaacacggtgcattgaggcacttataaaatgcagatgagcccagattttcatttttaggaattagatttccacctggctcattctttatgcattaaacattttcataatgcaacttgccaggtacagctcatgctgtactagtgtgtctcatccttttcagaaggaggtctcttagcaccagtgttagggaaagggctggaccgaggtgaggcaagaaaggcacctagagtgtgaaatataaggaggtgctctcacagatacccactcataggccctttagggttagtgccttcttatttttatgccctgggtgcttctcttgccttactcttgtcctggctttgataagggttccttaaaggccctttaaaaaggtacattgctgggttataccctcagcttactagatctctggaggtgcggcccaggaatgtgcatttattctcttcccttagagagtctaaggcatattgaagatttaggaccctgtcagcttggttggccaacctaaggccagcaggacaaaagctgctcaattagcctcaggttatgacccacctgggatagaaacttaacaaaactgcttaattaaccggcacatgggaacaagtaggccagccagaccacaccgttgccagccatggctgttgtataactgctaccaggtgtcacgctagaaggcttggatgttagagcatacttgtaaccaaagctaaatggaattgattatgtaattttgagctgttccaattttttaattaaacaatgttttataggttcactttcagctacccattcattgcaaaataaaattagaaataaaagaataaaatagaaacttttcatcaccttactacccagagataaccattgttaacatcatcttaaagtgttctttcagcctttcctccgcctattaagttaatatttaatttcactaagaatttaccatgtagtgttatgagcattaggaagtatgagtattaagggaatataggtatgagtacatctatgttgtgaacttagctcctatttgagtcctattcagttatctctaccatctttgtgtagactggtcccactcatcattcatctcagtgttataaaaaattcatgttgtcaggcgcttggatttcttatctcatggccctccattgcaaaaataatagaaatagtgccgtatttacgaaagtcaccattaggctgttcccacaggtctcttcttgtgactctataattgaatgcctttggaatcttagagacttgttcctttgggtgggatcttcatcatacaacagtgcttactgtgtgcctgctgtgggtctcactgagctaggagtcacaagtatactcaatcagtaagatgtcgtttctgccctcgagaacatcgagtctgatggaggaggcagaccaagatcttgcataccagcgtcaggtgttcttaaatgctttgggaataaggaaaggagagagaccagcttggcatcagagagtttaggcttgcttagaaaaggaggtgacacttaaactgagtccagagagacccacagtatggcacctagagtccctagcaaatagcactctcctaagggtctgctgatttcttgtgtcgtgtcctacttttcagcctgatcacacagttgcccatgataattaaatgaaacttgccagatggatgctttcgcaagacgatggcttgtcttcttgctctatttgtaaagctggcattggatccaaactctcaaggatgcccctaccttgagattgttttggagagtttctcttttgtgtatattagccaaatggcctgctcatcagcagggccaggttgagtgacaggtgggtgtgtcatgcatgtggatactctgatctccgccaactccagggaggtgcctccagggaggtgaggtgctgagaggttattctacaaagatgtcatttatcagtgttaccttcctttggggaaataaacttcctaagtttctgatctgtcagtctttccttctcactgcatatattttccctatcagttgcaatataattgatgttgaattccctgcgcattgggttaaaatatacaccttatcagactattctaaagaaggaatttttagattattgaggagaatatttagagtggcaaatacagttcacttcatttgtagtgaaattggttatccaagaaaggtagatattctgattataaaataataactcagtattaatagtaataataaattttattgagatggagtcccactctgtcacccaggctggagtgcagtggtgctcactgcaacctctgcctcctgggttcaagccatcctcctgcctcagcctaccgagtagctgggactacaggcgcatgtcactgtgcccagctaatttttgtgtttttagtagagatgcggtttcactgtgttgcccaggctagtctcaaactcctgacctcaggtgatccactgcctcagcctcagcctcccaaagtgctgggattataggcttgagccaccgtgcccagcaataataataataaataattgtttcatttctataagtcattcttagctctctgtatgtgccatctcatttaattgtctcaatatccctatgagaggggcacagttattattcccattttacacatgagggaacaaaaatttagagagatgtagaaacttactcaagttcaaagaactgagaaatgtaagagctggtattcagatgtgtccactatgcatggggctcccgtaattctgtgcttagacttggcacaatcaatgctattcttcagagtacagggtgagcatatcagcatccctgccatcctgttgcttctgttgagcttatttattcttagagggttggaatccttcagatgtattgccatcagaaccaccgagtataagtgcatcttcctttcactttgtaaataacttcaaaaattagaaattcttgagtgttagctggttattgtagttacatagaaataccaaattagagcatttctgctgttacagtgaatatattcagatttatatatatatttatatatatatatgtatttatatatatttatatatatttttatatatatgtatatatatttatatatatgtatttatatatatatattcacgttcataatatacataaatatataaatcttaggctggttttcttttctagttttctgttcatattttgcatttgaaacaaagatttgaagtaaagcccatattgtattttactctttatgttctagcttccctgtaaatagagtgattcggcttttaatcggcaccacccttccacccccaaaaaggagaaaattcatgtaagagcaaaagagtggggcttatcttttcctctaacaactcctaatttcatccattccagttcccacaataacttgaaattcctagggcaggtacagttgcttgaaatcccattggcaggaatcctttaaagtagatttttacctgtggaacactttggagtcctagagtttgattagaagcagtcttcagatccctactccctgaaagcagaaaccctgcagttggccctgccacctctgcctcagccatctcctctggggctgggccactgtggctgggaaagcctttctgggttggaccctgacagccgcctccttgtaccttccactccttggttcagattctgccctttgaacttgctccctcaggctactcagcagcctcaggaaggttgtagggattagagagggagtgaagtgaatgttgctgaggttttccagcactctgacatatggccatttctgttttcctgtagcaaaaccagaaatcctgacttacgacaggctcgtgaatggcatgctccaatgtgtggcagcaggattcccagagcccacaatagattggtatttttgtccaggaactgagcagaggtgagatgattatttttggcactgcttataatgcagaggggaaggactgcaattcacttgaatttcaaatatgttttctgattttttttaaaaaagctttgttttgattattgttttttttctagccatgtggctttttagaagggataattgctatatttttcttggtagacattaattttgtttgctgaaaaatcattactgaatgacttctctattttggtgttatctttctggatttatcatgcaatttctagcctgcaggtagataaagcaattttgcaggacagagtaattagatttccattctatacacaggaggtaatgtgtgtgggaaatgtgactgtagttatcatgaaaaaattacctcagtagttaattgccaagttaccaaaaagtaatgatcgcacaattacaacatacatatggcatttgcaagcgaccgcttttaaaaagggtttcttcttgataatgtgcccagcccctgaacagagaacatctggcactgtgctgcttgcccctcaccatccacacttaagccttaaattgcccttttgcattacctgaagacgaaaatggggtcaccacagctgtttttatccatcaattgctattttatgctcaggctttaaaagcccaggttaacatcacaattgaatagttagtatggtcgcagaaattttatttttcatggaataagcctctttatcacaacaagttggaaggggttacatcggattgctgttttcagctggggtttaggagagtgttttcttttggggaatactaagtagggttcaaggcccctgggaggaatggccacagcagaagcaagccctgtagttacaggcattcattcagtagatacacagggagtggcaagtgtgtaccagacactattctaatggacagaacacacccaagtctttttgcctttatgagtttatgttctagtgcaggggtgttcagtcttttagcttccctgggctacactggaagaagacgactgtcttaggccacacataaaatatagtaacactaacgatagctgatgagctaaaaaaaaaaaaaattgcaaaaaaatctcataatgttttaagcttcatgaatttgtgttgggtcgcattcaaagccgtcctgggccacatgtgggctgcaggttggataagcttgttctagtgggtagaaacacataatagatggaataaacaatgaatgtatgtaggtgttaagaaaggaaacagggaatagctaggtgtttagaatagggaagtcggggtctggctcatgaaaaggatcccttgcagtggtggtctcagccacctgcagtataactaggccttcctgcttagaactcaaacttcagtcctcactttgactattttctggtctacatccttgattttgttgttgttgttgttgttgagaccgagtctcactctcttgcccaggctggagtgcaatggagtgatcttggctcactgcaacctctgcctccagggttcaagtgattctcctgcctcagcctcccgagtagctgggattacaggcgcctgccaccacgcccagctaatttttgtatttttagtagagacgaggtttcaccatgttggccagtctggtcttgaactcctgacctcaggtgatctgcccacctcggcctcctaaagtgctgagattacaggtgtgagctactgcgcccggccccttgaagattttttatgctttcctcctctatgctatttcttttcaaccattcgtgtacccttttgaagcttgtttattttagggatctactgtgtaccagcatatatgcctgccattttattgaattcctttccaatcctttcagtaaccctctgcaatgggtattactatccctgttttacagtcgtagaaactcagtgttggtgggggttaaaaactcatcaggattcaaacccgcatctgactccgaagcctcctctgccttctcttccccagtgcttttttcactcactaggtcaccaaagtgcttattcttagacacttgtaaaaggacattttctgttgattatgaacctctaactttgttttaaaagtatgccacatcccaagtgttttatgtatttatttattttcctagagtaagccagggcttttgttttcttccctttagatgctctgcttctgtactgccagtggatgtgcagacactaaactcatctgggccaccgtttggaaagctagtggttcagagttctatagattctagtgcattcaagcacaatggcacggttgaatgtaaggcttacaacgatgtgggcaagacttctgcctattttaactttgcatttaaaggtaacaacaaaggtatatttctttttaatccaatttaaggggatgtttaggctctgtctaccatatcagtcatgattttaagttcattccaacattgaccatgtcatttctggtaatacatgcatcacaccatactgtcatcaaactcactaagtttcattttgtactagcttgttaagtatatgcttttaccagagcaattttaaccatgctactttatatattttatatgtatgtgtgtctctattagttgtatatttacaattgtctccattaaaaagagctagagaaagcaaatgggggaatatatttaccttacacccaaacagaattagaacaatctaaaatttaaattcaattaaaaatttcagttatttaaaatgaattattttaacactttgccagacactgtatccaaaagttaacactgcctttatgaagtcatgttagcaagttatttctttaaaatatttaaaatttgattcatgtgtgactaactctcttaacaagttaaaagatcttttgggcaaactgatgaattggtacaaagtgggaagacaaagaaactgggcacttactttttaggccttcttggggttttgtttgtttgtttgttgttttcgttttttgagtcggcaaagactagtgccaaaaagtggcgtgttttctcaggttttgagtagtgaggggaagaatcttccatgtttttcagacagggcaacgaaaagaataccttaaaaatgttttttttttttttggttgtgaaagacattcatgctcagtgtagaaaatttggaaaatacaggaaagcttaaagaagaaaatataaaccgtccataaaggaagcttcttttttttaaagttgtacaaggcaggaatttgattgaagtataaagtgcattcagatgttgcttttcattgaaaaacagcataaattattccttttctacagaaatctcaacttctattctgcagtattgtggtttcaagttatatttttaaagattcatttgaataacaagagtacaatgtaaccaaggtgaagctctgagactcacatagctttgcatcctgccatgggctgtgagttgggaggtggggtcagtttgggactgagtggctgtggtagagatcccatcctgccaaagtttgtgattccacatttctcttccattgtagagcaaatccatccccacaccctgttcactcctttgctgattggtttcgtaatcgtagctggcatgatgtgcattattgtgatgattctgacctacaaatatttacaggtaaccatttatttgttctctctccagagtgctctaatgactgagacaataattattaaaaggtgatctatttttccctttctccccacagaaacccatgtatgaagtacagtggaaggttgttgaggagataaatggaaacaattatgtttacatagacccaacacaacttccttatgatcacaaatgggagtttcccagaaacaggctgagttttggtcagtatgaaacaggggctttccatgtcacctttttgggtacacataacagtgactttaaggaactccagtggcttcctttgttttgttccacctgaaacaatgagttttctgtgaaattgcgccccttttgataggtttgccatagagaacatcgtaggaaaatgtctctggacaacattgtttttaattcctttattgattttgaaactgcacaaatggtccttcaattccaccaccagcaccatcaccacttaccttgttgtcttccttcctacagggaaaaccctgggtgctggagctttcgggaaggttgttgaggcaactgcttatggcttaattaagtcagatgcggccatgactgtcgctgtaaagatgctcaagcgtaagttcctgtatggtactgcatgcgcttgacatcagtttgccagttgtgctttttgctaaaatgcatgtttccaattttagcgagtgcccatttgacagaacgggaagccctcatgtctgaactcaaagtcctgagttaccttggtaatcacatgaatattgtgaatctacttggagcctgcaccattggaggtaaagccgtgtccaagctgccttttattgtctgtcaggttatcaaaacatgacattttaatatgattttggcaatgctagattataaactgcttggaagatttttttacccagactgttgttctctcttgctagattttgttttcctcattgttcttaagaatgcagattttaattttatcattatggggtagaacagcccaggacataccctagttattgtcgtatttgtaacatcaacgacatcagcctcttgaatatctcatcccgaccagaaggcttctgttatcttgtaagctttatacatttcttgatcatatgtagccactgaaagggttaatattaatttgcatactacaatttaaaacaggcgcctaagcctactggttctcaaatatacaccaaatgaggcaaacatttcacttctctaaaaataagtttccaatttgaagccttagttgaagttcccatcaaggatgtctgtgatgtttgcagaaagtatttcagttgaaagaaacaaagatgtgtaaaatgagctgtttctggagatccacgataaagttgacagccttatatcatgtcttccaataatccccataaatgttgcttcaccacatcatgaattgttcatgagaaaatttcttacccaagttaattagttgcctgttacttctaaactacagtttaaacattcatagcaccaaaaaatttttcaactagtagcgctcagaacacaggtcattttaggttttcactcactttccagtcttgtcccagctggctgctccttgtggctgattttcccactatgccacagtttgtgccttcattatttccataataacgttacagagagtgtgtgaagccctgctgtaaacagaagtgaaccagaggattcacgtaggaagcttgataatagtagaatctttgaaagcagtaacttctctctgtaaaaccagcagtcatgcttggctccaaatactaatgtcacttagaaattcaggttaaaagaggcttgcttgttttatgttactccacataaggctgcttttttgataagcagtgttaatatatgggattgtattgggactaagtagtctgatccactgaagctgaatattaatggccatgaccacccttgggtatttttatgggaggcagaattaatctatatatctcaccttctttctaaccttttcttatgtgcttttagggcccaccctggtcattacagaatattgttgctatggtgatcttttgaattttttgagaagaaaacgtgattcatttatttgttcaaagcaggaagatcatgcagaagctgcactttataagaatcttctgcattcaaaggagtcttcctggtaagactgatttacataaatagttagctgttgacaggcagttcatggggtcataagggtttgcaatcaaggctgattctttaaaaaatgaactgaggtactctgaggtatgaaatcaaaattattaaatcatttaaatgtgattaacagtttagaaagttaaattgtgtttttaaagattcaaacctagatttttgctgattttttaaaaatgtattttcagttttcttctacactttagttccatgcaactgaatgcattctatatctgtttctcttacggttctgtcctgcatgtatttccatttatactattgagcttggtactacatgcatgtttccagtgagatactgtttatagggaaaatgctaaagcctctcaagttgccacagtaaagtccctttaaaacctttagcagaatgacaaagagctctgaacatatctccacatgtaggcttcttgccatcgacctctggattattcctgtataccttgcctcttgccctttttatttcatcatgctattaaaagacataactactccagcacattttttaaaaattctggacattattctcatctctttcatcattgatgccattctgaatttgaatcatgtataaagagctttgagtttgacttacaaccagaaaagaattcttctcatatcttgcctattctttctttggaaatgctcttaagggccaccatttgagaagacttcctagatgtacccagtccaacagaagtcatggttattttgcccagtcccctatactgtatattgctgcagttgtgtggtagatttctcctatccttttcatgcactttatatccactgcatcttgcaatggcaagacattgcctcctgaactcttaacaccaggtcctcaaggagacctcagtaaatattattgatgggcaattaccccttaaagccattttctgtacctctggctaaagtttaaaaccccaggtgaaactttttatttttttttaatcctataaacttgagtagtttaaagtggtagtagaaactgtacaaaaccactttttgttagtttctcctgggcatgtgctcattatatgaagaaatgagccattttgcttctttccgaaaccttggccctatatatatcctttaactttctgatataatggcctaaattgttcaatcctgtgtgatgttctttgtgctttgggatcccatatgggattggaaccaccagcacactctgaaggagattgttgtcatggtgtttctatgctaatcagaagcaggaagtactagaaatcttgaagagtctccagccaaatgttgcagattgaagaggtccagatggttcagaaaatcatccaaattattggtgtttatctgaaccaacttgatttttttttaaaccttcctccatcagtcactatatgttaacgatctctgcctcctgcataacacgtcttggaagctcttctttgtctttctttcatcttgtctcctggggctcatttagagagtttgaggtaatacgggataccatatttggctctctgtctcccattaaattcattgtgtcaagagacgggaaatttctaacctgagtcctctatatgattatacacaaaaaggacacctagtttctgggcatggaccccaatatcgattattaaaaactcatttcttacagaacaggattttcaaactctttattcaaactttacatgactttcctcaaattggtccagtctattatgtagcaaaggggatgaggaggtagagcatgacccatgagtgcccttctacatgtcccacttgattcagtcatgacttgtttcatctctcccagcagcgatagtactaatgagtacatggacatgaaacctggagtttcttatgttgtcccaaccaaggccgacaaaaggagatctgtgagaataggtgagtacctacctatcaagcaaccaagagtaactttacagagagtatgtatatcatgctaatgtggaatataacatcattcccagtagcaatgatgcagaccagttctgctttatggtagcagtgccaatggtcaatggcagttagggttgcaagtgggtgtttggggtcagagcatatgtttttgtgcctgagtatctttctatagatatgggatctttgctttaattcgccatccctctcctctatggattttgtaacccagcctaggattgttaaatattaactttgtgattcagcatctacctttcctggacaccagggaagtgatctgcctgcaagttcacattagttcattcattaccagcctttggtatgtcattgccactgtcttttcctttcctgacctttatggttgtaattgctaagaaaaatcctctcttcctcacaggctcatacatagaaagagatgtgactcccgccatcatggaggatgacgagttggccctagacttagaagacttgctgagcttttcttaccaggtggcaaagggcatggctttcctcgcctccaagaatgtaagtgggagtgattctctaaagagttttgtgttttgtttttttgatttttttttttttttttttttttttgagaacagagcattttagagccatagttaaaatgcagaatgtcattttgaagtgtggtaaccaaaagcagaggaaatttagtttcttcatgttccaactgctgtctctttggaattcctgttctaatttataagctgtaaagtacaagcctgtctaaatgagtttttctatgaatattcttttatatgcagtgaaattcttttaaaacttttggcttttaggatataggatatgttcctagagaacagaatcattttatcagtaaaagcagagggcacctcatagttacaaggcttggggtgaagcatagacttgagttttattgaagttagatccaaatattatatgtgtggcttatgaagtgtcaggaaataaggggtcagagggagtaataaacacttgggagaaggttaggaatggaaagaatgatggaaccaaaacaaggagcatggtctgtggaagggtgaaaggagttccttaggaagtaagattaaccgaacagaatgagttaccagtcctacccttaaatgtcatgggtgacatttcccaacaattaccaaactaagaaaggatataagatggctgaaataaagaccttcttccgtgtgtccttgggagatgtcagattgaatttgcaaaggcatattaggaactctgtgaaaggacattcaaagagatgcatgcaaaatgaattttcagtttaaacaatatgatatgactatttcttatgtatttccctatgaatgaaagcagtcctgagaagaaaacagcatttattagaattgcttttaaaagagattataataattagactcttgattatgtgaacatcattcaaggcgtacttttgatttttatttttggtgtactgaatactttaaaacaaaagtattggattttttataatataagcaacactatagtattaaaaagttagttttcactctttacaagttaaaatgaatttaaatggttttcttttctcctccaacctaatagtgtattcacagagacttggcagccagaaatatcctccttactcatggtcggatcacaaagatttgtgattttggtctagccagagacatcaagaatgattctaattatgtggttaaaggaaacgtgagtacccattctctgcttgacagtcctgcaaaggatttttagtttcaactttcgataaaaattgtttcctgtgattttcataatgtaaatcctgtctagggatatcacacattttagcagtcaaattaagtatacttcagcaaaatttgcatggtatgctgaacattactacaactaacattcaataatagaagtcctaattctaattgtgtaattttggggcatgtgaaggaaacagaaatagccttaattttcattatagcctgagaatagcaatgaacttgattttgctcaagtgtaacaaatgtaggtcattgaaggtcacagcaggagaaattttggggggattggcatgccgtgtgaaaaatattaaaatctaagatcatattcagagttagccatatagaatgttggatcctagaatacacggagagctattaaataggttcataagtaataatgggtttgtagaacatagcaaatgtttttcaaagtgctgtatttccttgccaatttttattgaatcctcagaacaaacccttgtcctataattgcagcaccttcctattttaaaagttggagaaactaaggcatggcatattttagtgctttttatctgaggtgacacaggacaatagaggctgaaactagagcctgtgatttccagagtggcatcccatcgccatggaaaaccatattgccctttataatattctctgcctgtcttcctgggcccatttctgcagtccagatttattcctggaggtggatttttgtgccccttatgataatgtaatgttttccccccatcactgtggcgtctctattggtagcctgtactcgatttggttttgtaagagtgtttctgtgtttatctcctggccaaagcatgaatttctgaaaaggctgccctgaagctagatattatcatcaggagtgataataaaaacaacttctcttcatcctggtgcaattttggaaggaagaatgataagtcgttaattatccagtcctctgaatattgaccaaagggaggaggaagaaggtggccgcctccaggcccagtcttgatgaattctgcaatctgtctccattatttcatgcctgtgtaattttgtcaagagttgtccaatacctctgaatctttgtttttctccccttgggaataatagtgattcctgactcagaaagttatgagttaatatatgtaaagtgcttatgacagtgccagacatattgttactattctttatagatgtcttatttacgatctaaataatcgtgacggtggttacatactgtcttgttattggttagtgaccttagtttgaaatgacaaagaggggttggctctatcaggcttccagattgtagactccagttcaagtcagttgaactaaccaatcacagatctcgctttcaccaggctagtgggtaaggagaatttctggaacaagataagaagaaggaaactcatatatgttaccgccccacatttttgtcatcatcatttgagatctccttgttgtgtcaggttctctgaagttctttcctttcacatgagttcttcattgtttttcatgtcatggccccttttagagcctggtaaagcctatgggacccttatcagaacactgttttcaacgcctatgatgaaatacataggaataccaaggaaaacagttaaatcgaaatagctatgaagatactaagtaaatttgtgatatgtcagtacatgtgtttactatagagtgtaacaggctctgttaggttggtgtaaaagtaattgtgggttttgctattttttctaaaaaccactgtaattttagagtggtgattaatgtaaatatgattttgagatacctataaagacttaataggatatgaagatatttatgattactgttcatgacaaagtcacaggtacagctgatactactgcgttttatcacctttgttagtaatttaaagaaatgctaaatttcatctagaaattagcgaaaataaggatgtcatttttcctttccaagttcacaggcccctgaatttgacacccatagatctcaggttaggagcccttataggaactttagcacaacatctaggaagggaagggatattggaagttttttgttttgtttttgtaagctgactaaaataactttaacaccaaaaaaaaaaaagaaaaaaaaaaaaagctttcccagttttcaatcctaaatggattaagagaaggattgatttagctttttatggcagattaagattgggaatccagaatgcatctaaaaggactagttacagaaagtttagctcaactttaatggagagagttctccaaagagtcaggatcacaagccactactgtttatcaagtacttgcctttcttctaggcaatttttcagatagcactgagtcaggcggtgctaagcatttttacccattttatcttatttaacccacaagacaattcataaaattaaaagtattcattttgttttacagaagaagatactgaggcttaattacaaatattttagtgactttcccagtgtattagagaaagttttgggttttgacagaaaacccaaaataaaagaagtctaggagtagactttataccaggattggtataaaggttccatggagtacccgggcaagtctttcctttccatgcttagccattcctgagtgtaacccccatgtccatggtccaagatgaccaccaggtggatagccagccatcatatccagaaggcagggggcccttgcactagagaagagagggcagagggcacgtgccagctatattgtaaggaggttttcctgaagctgctatacagcacttacaacttagtggccaaaaccgagtcacctaactacagctagctagctgcaaaggaggctgggaaatgtagtcctaattgtgagaggccgtgtttctgtttttaaggaaggagagggacatattcagtggaaactaacaaatctctgcattacctaaggcccatggtggagccagggctaaaatgtctggctgtctctgacgtttgtgctcttaatctccatgccgtactgacatagtgctcacatcttaaaatggggataatgcacttgtgagccatgtatttcagaggtgattgggatcatctgagttcatataggtaaaaggtttttgtgagatggtactcaagttatcactccacatttcagcaacagcagcatctataagaatatcttctgttcaattttgttgagcttctgaattaacattattgactctgttgtgcttctattacaggctcgactacctgtgaagtggatggcacctgaaagcattttcaactgtgtatacacgtttgaaagtgacgtctggtcctatgggatttttctttgggagctgttctctttaggtaaaatgatccttgccaaagacaacttcattagactcagagcatcttcttgaagtttcattggtgtcctgcttccttgtgattaacactgctttgcaaactgtgtctcaggaagcagcccctatcctggaatgccggtcgattctaagttctacaagatgatcaaggaaggcttccggatgctcagccctgaacacgcacctgctgaaatgtaagagccaaaaaatttttcctttaggtcacgttttcccttttatttttctttttagagacagaaacccagatgttgagggttttcataacacagtttgaaatgtcacttggattctttatgacacactggtcaaatgtcatttctgtagtttattttcataatctcttgtcaccaaaaatacagaaagtttcagtaatatttcatacatgcagtgttttatgttatctatatgtcagtccatatgtccagttgcatagccctggaattattactgaagttgctggatgcccatacatttgaaaacaagctgagggcattgaggagggatagtaaatggcccttgtcttgcaggtatgacataatgaagacttgctgggatgcagatcccctaaaaagaccaacattcaagcaaattgttcagctaattgagaagcagatttcagagagcaccaatcatgtgagtataccctggccaggcatagaatcccccttctcccagttccaggtgtgtcctcctcctcaggctttcagggtgaggactaacctcccaaccccttctctcctaatcttaggttgcaaattgggcttcaggtaggggaagtaaagcaatggaaactagttctttctgcccagccctcctgttctgagccaaagaaggatgtgagattgagggggaagggtggagagttttgtactcactggaagtagaagtttccataaggatttgccatgtttcctccctcatctcaaatgctggtcacggggtcagtattttctccctctcacatgtcagggccatgcatcctttggagggttggggtgatgtgaactagaataaaagcatagaaaagacagcttgttactgcagtgaaataagccttctgatcaaacaagcatagccagaaaatggcagatagctgtcatgcccacaagccatatagaatgaagagctgtttgaagttgggagatccctcccagtgatttgggaagtgtgggggaatgaaaactcaaatccattatttcctctctttttaagcaagaattagtgatactttgactcagatttttttaagctgctttctttcctgggctgtgtgcttggagctatcttttctttcctaatagcacaccactgataatttttgggttaaagcttgttcttctgggtgtcaaaacatgtttcaaattgaacagcattttccacccagttgctttgattcttgacaagagacccctggaagggccgtgggtttcccagcaaattacattggttattgggttgtagttgctggagagatttacaagccttttaaataggtaagatagtgcttggtgcctggtgtgcccttttagaagagctaagcttgtgcatgttttgtccccacttcttgtataaagttatttccttggaaaaatgaagggggaaaacaaagcttatatttgttttgtcagtatgacttgggttttggccacaaagttcttggaaaccacttctctcttaagagtttccatcagttagttgtgatcttgacactgtaagtatgccttttgttgctatgttcgttgtagggactgctgtattgactatgggcttgttttctccagatttactccaacttagcaaactgcagccccaaccgacagaagcccgtggtagaccattctgtgcggatcaattctgtcggcagcaccgcttcctcctcccagcctctgcttgtgcacgacgatgtctgagcagaatcagtgtttgggtcacccctccaggaatgatctcttcttttggcttccatgatggttattttcttttctttcaacttgcatccaactccaggatagtgggcaccccactgcaatcctgtctttctgagcacactttagtggccgatgatttttgtcatcagccaccatcctattgcaaaggttccaactgtatatattcccaatagcaacgtagcttctaccatgaacagaaaacattctgatttggaaaaagagagggaggtatggactgggggccagagtcctttccaaggcttctccaattctgcccaaaaatatggttgatagtttacctgaataaatggtagtaatcacagttggccttcagaaccatccatagtagtatgatgatacaagattagaagctgaaaacctaagtcctttatgtggaaaacagaacatcattagaacaaaggacagagtatgaacacctgggcttaagaaatctagtatttcatgctgggaatgagacataggccatgaaaaaaatgatccccaagtgtgaacaaaagatgctcttctgtggaccactgcatgagcttttatactaccgacctggtttttaaatagagtttgctattagagcattgaattggagagaaggcctccctagccagcacttgtatatacgcatctataaattgtccgtgttcatacatttgaggggaaaacaccataaggtttcgtttctgtatacaaccctggcattatgtccactgtgtatagaagtagattaagagccatataagtttgaaggaaacagttaataccattttttaaggaaacaatataaccacaaagcacagtttgaacaaaatctcctcttttagctgatgaacttattctgtagattctgtggaacaagcctatcagcttcagaatggcattgtactcaatggatttgatgctgtttgacaaagttactgattcactgcatggctcccacaggagtgggaaaacactgccatcttagtttggattcttatgtagcaggaaataaagtataggtttagcctccttcgcaggcatgtcctggacaccgggccagtatctatatatgtgtatgtacgtttgtatgtgtgtagacaaatatttggaggggtatttttgccctgagtccaagagggtcctttagtacctgaaaagtaacttggctttcattattagtactgctcttgtttcttttcacatagctgtctagagtagcttaccagaagcttccatagtggtgcagaggaagtggaaggcatcagtccctatgtatttgcagttcacctgcacttaaggcactctgttatttagactcatcttactgtacctgttccttagaccttccataatgctactgtctcactgaaacatttaaattttaccctttagactgtagcctggatattattcttgtagtttacctctttaaaaacaaaacaaaacaaaacaaaaaactccccttcctcactgcccaatataaaaggcaaatgtgtacatggcagagtttgtgtgttgtcttgaaagattcaggtatgttgcctttatggtttcccccttctacatttcttagactacatttagagaactgtggccgttatctggaagtaaccatttgcactggagttctatgctctcgcacctttccaaagttaacagattttggggttgtgttgtcacccaagagattgttgtttgccatactttgtctgaaaaattcctttgtgtttctattgacttcaatgatagtaagaaaagtggttgttagttatagatgtctaggtacttcaggggcacttcattgagagttttgtcttggatattcttgaaagtttatatttttataattttttcttacatcagatgtttctttgcagtggcttaatgtttgaaattattttgtggctttttttgtaaatattgaaatgtagcaataatgtcttttgaatattcccaagcccatgagtccttgaaaatattttttatatatacagtaactttatgtgtaaatacataagcggcgtaagtttaaaggatgttggtgttccacgtgttttattcctgtatgttgtccaattgttgacagttctgaagaattctaataaaatgtacatatataaatcaagtggagtcatttgattgttgagattcgttgagattaaactttaaagcattaaagtgcaatcatcctgacaaagttttgtacgcagttttcataaaatatgtgcagggctatcagatcacgctaggatttacatgcttcgagattcaacagatattaagaattttcatacgtgtgatattttctcattttagtcttacaacctgaggtctctatttaaattgaaaaatagatacagagaaggtgcttagtatgtatgagctgggtgctgtcatgtgggtgaaacattatgcatgcccaattggtaccgtccagaccactggaacccaaacagaggctgagagttcttcagcttgaaacaaaaggaagcaccctgaatcacataatcttattaagaatgaggcacccacacaccctcagtcatgactgtctttattgacgtgacatctacacctgcagaaatgtctcctgaaaggaaagggaaggggtgaaaagtgacctgtaatgaaaaggaatccttttaaaatccagagggaattgtgtggcaaggaatgcgtcaataatcagtgaaaaacagacccacatttcagtcaggcaattcccattattttattgcagacaggaatgaatgctaattgaccacaaaacaaagaagtcttttctttccaaatgttttcactgtcatttagcctttgtcatgtgtgagaaatttgcgttagaagcagttgacagtcccctgtgttaagagtctagctaattttcctcaccagcctagcttttcattggaaaggaataccaggtcttggtgcccaggctcaaacttggttcgaatctcagtgccacccctgtgtctaccacttaaccactgtgtgacattaggcagattagctcttgaaatctcagctcatgggagtagtgtctaccttgatgtattaatgtgaggctgtcaagaccagctcgttcatatgcctaataagtttttccacggccaattcaccttattaagcagggagggcggtgttcctgtactgacataacccatgtaaaattatacagtcaaaagcttgattctaattttctttctcttaggtgcaaacagtattgtacaagtgtgttgcacaacttgacattgctataaagatttctgggtggtggtggtggttttttttttttttaatcccagtgtttgaccaggaattcaaagctctctattcttgctccagccttccttcctacttctctcctattatcaaaggcccatgagtatgccccatgctcttctctgcttccattctcagactgcatactgtctcttctctccagcaagaccccatctttcaagaccagcaaaatcatctcaatgggaagctgtcgctgaactcccacaacactctttactttttatggctcttacaattgatttttttattattttggcttttgtcttgtccccacccatactatatccagacttaaaatcggttaacataaaattcccgtatgtgccagggttactggtgtcagtggtatcatttacttgttaaatattgaattgtccggacgctcaggggttaaattgcccaagaggttgcaagagttacattttgcccaagttcatggagcagtacatgaaaccagacttggaatccagatctgtacctcagtgatggcaaacacctggtcttcccatgctggtgtctcccaccaccctggccatgcagacatcactcatctgccaccacaccctccaactgagcccaggtgccttagaagtcacagtcttttccaacaagctgataggagtcaactggtgttagcctgcagagagacttacctgtcccccttaaatgatgaccaagtttccatcttcctgagggacagatgttcttcatctcagacaccccaaagctgctagcagagtacttcaagagtggttctttttgaacaaataattaaacatcccatcagtgtttggagtgagagagagccattagggaggaaatgggcccaagaaagagaggaaatagaagaagacagaagctagtgaagttagcttaatttcacatgaggggggtggcgctttggggagaagagaaaggggaactagaaacattccttcggacagccttactgaggcctatacagaggctttgtgggaacaaggagaagagaaggaaaggagggcgttggtagttggggaagggtgaagaggaagggaaagtggcaggagtgctctgccttattcagaagtagggagaggagctgcagctgacaagcagtttcagggcttaaggtgcagaagctgaagacaggaagaccgcaccaccccacacttggtcttggagaaggtcagcagcaccagcgtctgcatgagaaaatgccccatgggagaggtctcgggatgagcaaggcttcaggaagcaccacctgggcagcctttgagtgaacctttatgaagaaaagtgtattggtttgctagggctgccataacaaagcacttgaaactggctggcttccatatggaaattgattgtctcacagtcctgcaggctagaagtcttgagatcaggatgtcggcagggtcggttctttcggagcactgtgagaatctgtcccatgcctctcccagcttctggtggtttgctggcagtctttggcattctttgtacatctctgtcttcaacttcacatggtgctctccctgtgtgtgtgtctgtgtccaagttcccccttttgatgaagacactagtcatattggattcagggttcaacctactccagtacaacttcatcttaactaattacatctcccaagaccttatttccagtaaggccatattctcaagtactgggagttatggatatgacttcaacataggaatttgggagagacacaattcaacccagaacaggaaaatctcaaaaccctcttgattgcaggtgacctggttctccctagagtactaaatgggctctctaaaaactcttgagtgatctccaaagttccagtttcagagcactctgttcaatcattccattgcctagagcagtgtttagaacagagcctggtcagtagcaaccactcaattgtcaaataaatgaagctttatgcattgaaggactcctccttgaaacttgccttcttgcctgcattcgccggtcctcctctttgtcttcctccagcacccctttaaaagtgggagttccagcgtttggtcctttcttgtcttatgttctccaatctctggtcaatctcatctaatccctgagatgtggctgtcatctaccaacctacaatttccaactctgacatctctccctttgtatagactagaattgtcagataaaatagaggacatccagttaaatttgaatttcaacatttaatgtaagtgtgtacccttaagtatttagaacatatggatcctaaaaaattattgtgcacttgaagttcaaagtcaacttgatgaccagtattttgtttactaaatctggtaacccttgtctagattgtgagactcttgaagttaaggatgacacttaattaattattggatattctaggtccagcacatgaaagaaatgcagtttcaaagatactaaaatatagaagaggaactttattttattgaaggtctgcaggtggcaaaccctttactttttgatgtctaaattgtcatttcaccttcattcttaaaaatatatttgcactagatatagaactcaaggatggcagttatattttttagcacattcatttccaccctcttcgagtttccattttttgctattgagaagtctgttcaggttgtcattctcctgaagatattatttttttgttttcattattgcctctaacattttctctttgtctttggtctttacagtttcactatgatatgcctaagattgaatttctccttatttatcttatttgaaattctttggacttcttgaatctatagattgatgtctttcatcaatactggaaaaatctcagtccttttaaaattgttcagtcttttaaaaatctttcttctccatcttatttctcttctccttctgggactccaattcaatgcatcttaaagtctcactgtatccttcatgtctcttaatctggctttcatattttccttctttttgtctttctatgctacatgcaaggtaatgtctgttattcctgttatctgaatcccccttcagctcctgtccatggagaaccattttagtacctttactgaggcataattaacataccatagaccccactggccattgtaagtatataattcaatgattttattaaattacagaattgtgcaactattcccacaatccagctttagaacattgctgttatccgcaaaatttcccttatgcctgtttgcagttaaaaggtattcaaataattttaatggattaattttcagttatttttgccctgtgagataataccacatatttcactttctcttagattactcactcattgagtcatttattgtctctgggttctttccagatgttttggtcacataaataacagtgataatcaacaggttgccttggttggagaattatcagtggtgataatactgatgataatgagagctaccatttatgtaatgcctattatgtccctggatctttattgggtgtgttatacgtattaccttatttaagcttcacaacaatcctggaaggtaggtattatttgtctccatttaaaggtgagaaaacttggcctctgagaggcttgctatcttgccctaaacttcatggctatgggcaatggaattgagaggtaagctctagtttgacccctgaatcataggattttaagcagcaacttcaccaagatgagcaagtcctttcttgtctgtttctcagtgttggatgatctttgagccatttcatttcacttttaaaaatacaagagaaggctgagcatggtggttcatgcctataatcccaacactttgggaggccaagggggaggattgcttcagcccaggagtttgagatgagcctgggcaacacagtgagaccccatctctataaaaaataaaaataagataaataaaaatacaagaaggtaaggaaatcaaatcagccactttgctacttattactaattcctctaaaatgttggtgagaatgtggttgaagtaaatgctaatggagctaatataggctccagaattatctgttgatgtcacaggtttgtgatctgcccacttcctggtgtgccatgagaacttccccatgtccttcagggatatttatccccctctgtttcaaagaataatctggttcatttgagcctagtgagaaaaacaaaatgctggatttacagaggggtgtggggtctgaagtgtggagaggagcattagatagagccaatcaggaatttcagataaatgagagtgtgggtgaaaatactgcctttctcttgatccaacatgttattgttggttataaattaacaagctgttacccatatgtctcctccactgttgattccatgttcattggttgaatgcagcttctatgatgtgggttcttctatgaaggatttaacttcacaagggctaagtcctcagggtaaacgctcctagttgaaataaaagttcttgagtggctcagctgtgtgtctccatccatggctaactttgaagtgtgcgtgcctctttgagcacatcagcagggctgtggtgtattttatgaggctgacctttttctttgtggtctgtggcttagcagccactcttgttctatagtaaatgaagaatgaggacaggcaaaaggactttcttcatggctgcttgtctcaggatatgcacaggcatcctagggaaactgaaaacacttgtgtccacacaacaggccacctgggtggcctgagtgccaaaccctcttatatggcataatttgcttctaatcagggtgcattttactcctatggagtgtttggtacagaaagcgggtatgtgtgaactgaatttctctactgctacattcagatactccagttgacatgatagcatgatgtgacaataggttttattgagtgatctggttcattagcaaagacgtgaagtgacttttttgagaaggatacagaggtttccaataggttcagtgagaaagtatgctgtggttaagttctgtctgcttggacataggcatgaggaattgtattttgtgtgctaactcttacatagcaccaatatatagctcgtatgttctcagtgctttacttatattcattagtctaatcctctcaaaaaccatacgtaagttattattttacagatgaggaaaataaggcacagagagtgtcaaacagcctgcccaatgttacaaagctagtgagtggccaaggcaggactggaatccaaggagcctgggtcagagtttgggttctgaaccactatgccaaactgcctctctatgtacttattttcctgttctaatcaagacagactacctaggtcagccgggttccatacaggcctcatatttttccctggcctaggatgcaagaggggatcttctccacatggatgcctcctacacatgagtttccttgaatgtccttcttttctcctaggctgacaaggatttagattcctgaccttgcaaaatgagacggctttttcaggaagacagtgatgaagccccaaggataaacaggcacccagagcacatgttggtggcaattgaactgtctttgacatgcatgatatctatggatgacagggaaagttgaagacaatggtacagtgtaaggcagcagtccccaaacattttagcaccagggaccgattttgtggaagacactattttcatggacaggggtggggagaatggttttgggatgaaactgttccacctcagatcatcaggcattagattctcataagaagtgggcaacgtagatccctcacatgtactggttaacaatagggttcatgctcctatgagaatctaaacccgcctctgatctgacaggaagctgagctcaggcagtaatgctcccttgcccttgcaatgcagcctagtttctaacaggccatggaccagtaccggtccctgttgaggacccaggttgtaaggagtcccaagcccatcctgttgccttagttgtgctactatttaccacttaccttacctcctttcttaagcaaccatttattaagccttaaacacttaacttgcattatttcatcctatcctcacaacagccctaggagatagggagttatctgtattgcaaagatgaggaaactaagactcaaggagtttaagtaaattttgtttaactccaaattccttctcaatggattccacagaaaatttccactgttgttgctgctgaactccaaattaagttaaaagtcccaataagcaaaatagacaatagcgacaggggtccctgaagtccacttgcctgcccagctcttcctccacagctacctctcagactctctagtccttcacagaccacatttgggaaatcactgaaagttccctgcagttcagcagcttaaaatcccaccctgtcgtgatgtggttgactgtggcttaggtctcctcttcctgaaagacttccagtccctggggcaccttgggggcattccctagtctcttaaatgcagactcttctattgactcaaacaggaagatatggaaggaagcacaccttccctgtccacaagtttctgagatttctccagcactaaggctcttgtttttaaatttctttttaatttttatgtaatatactattattttcaaaagatctgctcagctcttattttccttgaggtaatcaatgttaactttcatataataactttcatacctttctattcttgtgcatatatttatatctattatttaaagaaatgggattattctattaaggaaggcaaagaatttttatctgaggaatgtgagccctttctaacttttaggcctaaaaagccattaaaatgagaaaacaatcacatcctacttccctgctttgtgagctatgcattcacccattgaacctgcttgctattgcctataaattaatctaataatgccacatcaaacactataacccacactctagagtttaacaatgtatagccaatcactaatcaatgttatttctgtaaaccaatgagaattcctgacaaacaatgaatgtcctatcaactccctgtccctttttttttttccgttaaaaatccatttgtaactgccactaattgaattatacgttcatggcaacttgaatctatgcttccaagttgcagtcctcaaccttggcccaaataaactctctgcttatattaattttgcctcagtttcttcctttccttttatgtcaacgttttatatatatatatatacacatatatatatgttatatatatacatatatatgttatatatatacacacacatatatatgcaactaacattgcattgcatatatatatatatatgcattgcatgtatatattctgcaactagcatttttaacttacaatgtattatgattatcactccatatcatcacatatagattaaatttacagttttccacagtatgggtctaccacaaacctgatattttcaggtaagaacttgtcacgttggctattggcagtctaagatcttatcatttttggtccacttctgccaaatgtagaggatggcatacatttgtttgtttggactaaaagctaagtcagggggaagtatgtgatatactattttggtcagtttagcaaataaagataatttatataagagggcctagtgcagtgccagttgaggcacatgtactcattaaaggttagttaaatctcaaaatataatatgctttggtaagtaagaatgaactgagaaagtaaaaggaatattagtgtgcctggacagatttttattgaatgtattttaaaagtaagattattagctttttgtagatgtctaaaggaaattggaagaaaaggagttattttcccatcaaacacatacttctacagattggctgcctatgattaaaatagagccaaaccacaccagggttgctttagacattcacccttcagataacaataggttatcactttcattttgaactgctctccaatgaatgcaacccccctcctcccaagaatgtcaatcaatccttgctccagtttgggctgattggtaaagtattagcctgctcttaaccacacaaaaatagctgcactccaggtacttgtcaggcagtataagctccaactccctggcattcagaatccatcaaaagcctggttgatagaaacaatacttatgcacaattgtctaaagaataatcagttcatctgccctctgttttgaaattcaagttctattcatgaacttaagaaagctgtgtgtatggattgggttatattgtaccataaccccagaaatgcttttgccaaattatgctttgggtttaatccatcagcttccaccgcaaattaaagaaattgttaaaaaaagaacattattatgattaatgtttattgtttggagtccagaagagttgagttttcattccacctctgccatctattagccataagactttaaggctaatatacagaatttaaaaggaacaaaaacaacaacaacaacaaataatcccattcacaaatgggcaaaggacatttttcaaaacaaaacaagttaaatggacaagaatatgaaaaaatgttcaatatcactagttatcagagaaatgcaaattaaaaccacaatgagacatcatcttatactaatcagaatgactattataaaaatgacaaaaaataacagatgtcagtgaggatgtggagaaaagggaactcatacactgttggtggaaatgtaaattagtacaacctctatggaaaacagtatggagatttctcaaagaactaaaaatagaactttcactctatccagcaatcccactactgggtatccaatcaaagaaaaagaaatcaggccaggcatggtggctaatgcccataattccagcattttgggatgctgaggcatgtgaatttcttgagttcaggagttcaagaccagcctgggcaacatggtgagacccccgtctctacaaaacattcaaaaattagccacatggtggctctcacctgtggtcccaactacttgggaggctgaggtgggacgatcacttgagcccgggagacggaggttgcagtgagctgagatcatgccactgcacctcaacctgggctgaatgagaccctgtttcaaaaaaagaaaaagagattacatcaaaagatacctgtactcatatgattatctcatcactattcacaatagcaaagataagtaatcaatctaagtgtccatcagtagaagactggataaagaaaacgtggtatatatacacaatggaatactattctgccattaaaaaaaataaaatcacatgtttcgtaacaacgtggatggaactggaggccattatcttaagtgaaacagctcagacacagaaagacgaataccaccatgttctcacctataagtgggagctaaataatgcatacacatggaagcagattgtgaaatgatagacaatgaagacttggaggggttggggtgtgagggggtggatagtaggaggttgctctggtgggtacaatatgcattgctccagtgttggatgcactgaaggtcctaacttcactgcaatgcaacacatcaatgtagcaaattgcacctgtactccatgcatatatacaaataaaaaaattttaatgaggaaaatactatttaaaagtctagaataaatatataatcaaaatgcttcaaaaattgtgtaatttcacactccaatttaaataaactgaaattcaaaatcatagctgatgtattgtggatgtgatttatataagaaaaatggcaccataattcaaatcagaggacttttaatcaaagaaagggcattgaaagattggggaatgaatgtatgttcatagaattaatttacataaaaggtttaaggtattactgagtggttttttttttttttggcttttgtttttgttttcaatcggccagtgaattactagacccatataatttctattgtattattttcactaacagcacttttaagactcatgaaagaaatcgcatgaaacagaatgttttggcttaatggattttgtgaatcaaataatgtttttttctctttgtagttactcctagaaagcttggagccaaatgagtgatttaccccttgcaaatggagaccatttgatgatactcattttgtattaatcttgtgcctggctccttgtttcctccctcatttcatttccctttatttgttttaaagatttatgttattttatgtaactgtatgtatcattcaagatacagataccaaacctgcgacctttctatctcaagcagagagggatttagtgtagaattaggtgcttaatcaggggctggaatggtgggctctaggctggttctccaagaatatcttcttgaaaaacacagctaaactaaccataagggctgctgctgcctctggcatagccaggatatggaaattgggaggccaccactggaatcattgatctcaaaagctcacctcgtagctgtatcccaaaggtgaggaaactactgttgctaagattgctgcctctgccttctcatgcccataaaactaggagctagacaacgtaatacagaaaaacaccatttcctatgcccgtctttcccaacagcagcagctgaagcaggagggaaacgatcgtctccacttcacttcctcctgctacacctcagataagtactgctgacgggtggaatcgaattcacagcaagaatcctagcttcaagagagtccaggaaatatttctcatcaagtactctgcagcactgcaaccaaactagaagaaggctgcaatgaacgctaagagccaatccaactgtaagtatttttgtgagtcgccataaatcctttccggtctaaggtagggtgggcagggatataattagcaaaatgctcccaatcccttcaccttttaaaaaataaaagtagcatatcctctcgttatgttatatccaacatacctattttttccctcacacaaatattaacagtaacacttggaggaaagaggagactggaaattaataaactagagctgagtactgattctactggccttgggacatgaaacaagactgagacccagttatctcactaacacaatgagaataacagtaacaccttccctaactacctcacattatattgtaggtataaggatctctttatttttgcctttaagagacatgtgacatttatgtttctaaatcacattttgtctgctgtacaccccttgtcctaccaagctggcaagagatttaatctaagtcagaattgggctccctttcttccccagagatgtgtggaaaggcactgggacttacacagtaagagaggagagatggttctttgcctttggtcggtagtggtcaatgtaagatcctcatttaaaagtcatgcatggtcccttgaaaccaggcatttctgttgctcctgtaccagctggggagccaggtctttggtgccagatatacattgataaatgaggcatagacagcatccttaagaagcagatgggctcctgggagatagagatcataaatatataatttattacaatgggatcaggggtaggtatacagaatgccttaaaaacatagagaagagaactattagttttgtctggggagtcggaagagactttatggtgcctgtcatatagtagctactcaataaacctgggacctggctcttctttgcttttcggagtattcctaccagagtattgtggtgttgcaatgcatgagccccacttacttgctgcattgcaaaactcctatttccttgcgagtctcaggaaatttccccaaatatcccttaccctctctgagaaaacctagcataatgcattttataagcccaggttttaaaaaatgaaggccacaaaaaggaacgggtgttgtcttctggcaacttctgtctgccacacaaattaatctctcaacaaattatactgccacatctgaaagagttctcagacgtgtcaagtgttatataaatgcatagaacataactcaaggctttgctgtttgtctaatctagtacgaggctggtcctaacaagtagcagcattttggctgcaagattcagagaatgccctgaaaattgtacagattagaaaatatgcagcattattttaattgttacttttagaagatcagaaagaaaggaagcagacagtcaaaatgaaagaaaaccttcttcagttctgtctaatcccaccaatatcctgccaagcagctgaggggctttgcacaggtcatttaaggtttgtgggagctggatttgtcatctttgaaatgagatggccgtgatatagcaatggttttcaacatattcagtgggcatgaggatgggagtggataggtctctaaccttattttaactagagctgcctgacatttatctggtttatagattaggttagaagaacccaatcttgcactcaaagcaagaaaaggttttgaaaaccactagacagattgatctctggggtctatgcttctgtgaatgcaggtgaatcttctgagaacaggtggtgcatgctatcccatcgaggttctctattagatgccagaaaatgatggctgcagccccagccatgggctcagaacccaaaaatgttgtaacaggactaaccctcctgggatgtgcatagctccttgggaaataggagttgatggtgcaatgcctcctaccctggctttgccaatccctcacccttgttttcttttttaattttttttccccgtaatcttgccttggggtgcacatgtttgaggtaaatgaatcaggacacaggcagacagtcttacacttctcttttggctgccttcatggctgatctgtcattttccatactagtcaaatgaagcccacaattctagaatctaagccactagctccaaagtcacagcagataacataaattatttaaccaccacagtcttccatccaaaaaaacattttctgcatacctgctctgtgtgaggcacaagagtaggtggcagacatacattgataaagaaggcatagacagcgtccttaagaaatatatgggctcctgggagatagaggtcataaatatataatttattgcaatgggatcaggggtaggtatacacaatgccttaaaagcctagagaagggaacaattacttttgtctggggggtcggaagagactttatggtgcctgtcatatagtagctactcaataaatatttatcaatgagaagatgtttgaggtgatagactttgaagttagactgtgtggaattgggtcccagcttcatcactttatcagctgtgtaactttgggcaagatatttaagttttctgtgtctcagttttcctatctgaaaaaaatggggtaaattgtactggggtcaacagttgtgaggattaagagttaatgtagataaggtactaaaacagtgtctggcatatggtaaatgcactgcataggcttgcggcttactgtgggcattgaactggagtttgcagggtacagaaaagaaggacagatagtgcctgggatccagattaaaaacagaatttttcaataactcagtgaggaaacttgctgtgagtggaattaaagaaaaggggtggggcttggggggcgatgcgggagccccagctccctgtacttgtcctcccttcttctctgcctctggcctcctgtcatcttccttctctatctctgatttttttgtaacgttttgttctcctttctttccttctcctttttttgaccccaattcccttttccttcctccgtctttcttctactctctgcttcctcctcccctttcctctatctctcttcagcctcctgagacctgctctttgcatcctctgtttcctctttttttttttttttttttttttttttcgagacggagtcttgctctgtcgcccaggctggagtgcagtggcgcgatctcggctcactgcaagctccgcttcccgggttcacgctagtctcctgcggagtagctgggactacaggcgcccgccaccatgcccggctaatttttttgtatttttagtagagacggggtttcactgtgttagccaaaatggtctcgatctcctgacctcgtgatccgcccgcctcggcctcacacagtgctgggattacaggcgtgagtcaccgcgcccggcctcctcccctttttaatttccctgtatccctgttcttcctccccctgcctactcaaccaagctggctctacagatacttctccaaggcctgaaaaaccagaccttcttcttctctctgccccactgcccctggcaagaagcatagtaataggcttaggacagaccagaacagataagtaaatcttttttgttattgttgcttctccgagaatgataccagtgtttgcccctttgttccaacacagccagggctctctttatgacatgtgtagcttggggtgatcgtggcttttggtcttctaacttctcactgtcaaacattctaacagttttcagggtttaaatggcagtcattgatatgaacagaaccacccctgctgacaccctgtaggggataaagccggaatcttcagaaggaaaaaatcatgagttttctacactcagaaattaatgctcaggcatgaagagtaagcctggagctggggcagaaggcctttgagaagtctggcctgggcatctcctgagaggggctttcattcttttctttttttcattctacaaatgattcctgcacatcgactgcattcaaggggatgcaacgttgacaagacagacaaggtccttgccctcctgggatgacttctaagggggcaggtagaccataacaagtcaaaacatgaataagttacatttacataatagcgctatagttactttgaaattactggtgctataaagaaattaagacagttattaacacagggatttttatggggaaagaatttgcttcaaatcacatagtgaagtcctccccgaagaggagctgtttgagctggttcttcaataatagtaagaagccacagaaagacctggggaggggaattccagcagccagaagggcaagtgccaaagactggagatgggaagaatttagaggaaaaagaccccaacaggtggagagtagggactgagtgggaagggtggtatgtgatgaagctggggaaggaggcagtgaccagtatatacaagcccttctaagtcgtgtgtgtaagtccattttgtaagtgacagagactgaatggctgattatattagaaaagtaatttgttgaaaggagcttaggtgtccctcaggattgccagggaaagatatggaaaagagatcagatcacaggcagtagctgggcacttgcaacaccagtgttgtactaccacccttgtcatcactagacagcagccttgttgcctcttcccaacacctggatggagtggtgggaagattaacattcgaatgttaatctcattcaaaaacacctttgcagacacacccaggataaatgattaaccaaatatctgggcacccatggctcagtcaagttgacatgtgaaattaaccatcacaatgagcaagtgcagctaattggctgagtggtcatgagcctattccttcagaatgtgaaagcctgggaaagtgagtatataaagtattcttgagtgaaaagcaaagtccaccacccaaaactcaaaaggtggggaatttcccaagggtagaaagtggattaggattctggataacctaggaaatgacaaatgtccactttaacttagcaagagttatctttttatttaagtgcaatgggaattcattggaggactttaaacaggaagtgatataatcaaacttatatttttaaaaggtcaccctggttacaaggtagagagtaaattataagggggcaagagtgaagtcaggactgtcctgcaagagataatgttgagagatgatgttgacttgaccagcatgtctgcagtgaagggggtaagaaatggttagattcaggtttattggaggtaaagtgaacaagacttcctgatgatttaaatataagggattagggaatggggctaatcaagggtgactctagttttccacttaaaagatttgctggatggtgatgcaagctactgggatgggatggggagaaagaggaagatggggtgaaagaggaagggaaaaatcaagagttcactattgacatgttaattttgacatggatgaggttcctattagttatcgaagtagtgatataaagtacatatatagatgttataggcttgactcgggagagaagtcaaggtcagagatagaaaatggcaggatgggctttagagccagacagctttgctttgacttttgcttctgcaaattactagctgcataaactggagcaagttgcataatgtctttgagttacagtgtcctcaactgtaaaacaggagcatattagttttatcaggctactgtaacaaagtaccacaaattaggtagcttaaaacaaaagaaatgtatgttctcacagatccgggggccagaagtccaaaatcaagttgtcagcaaggccagccaccctctgaagattctagagaaaaactccttcctggcaatcattggcatttcttggcctgacgctccagtctctgattctgacatcaaaggacattctcttctcccttttctgtttgtttttgtgtgtctgtgttcagtctcctttcttttataaatatactagtcactgggttaggggcaaccccaattcagtatgacctacctcaccttaacttcattacagctgcaaagatcctattttccaaataaggtcacgttcaggacttcaacatatctttggtgggacacaattcaacccacaagaagggatatctattttaagtgcctgctaccagttaattgctcaataaatgcgtgcacttattcttaaaaaatttttttttgtttccataggttattgaggaacaggtagtatttggttacatgagtaagttccttcgtggtgatttgtgagatttagagcagacatcaccagagcagtatgcactgcaccctatttgtagtcttttatctctcacccccttcccacccttttcttctgagtccccaaaggccattcttatgcctttgcatcctcatagcttagctcccacttatgactgagaacatacaatgtttggttttccttttctcagttgcttcacttagaataatagtctccaatctcatccaggtcgctgaaaatgccattaatttattccttttaatggctgagtggtattccatcatatatatatatattttatatatatatattttatatatatatatatatatatatataatcatatgtatataactgtgggcatttgggttggttccatgttttcacaattataaattttgctgctttcgtataatgacttctttccctctgggtagataccagtagtggaattgctggatcaaatgatagttctacttttagttctttaagtaatctctacactattttccatagcagttgtactagtttacattcccaccagcagtgtagaagtattccctcttcaccacatccacgcaaacatctactatttttttattatggccattcttgcaggagtaaggtggtatcgctttgtggttttgatttgcatttgcctgatcattagtgacgttgagcattttttcatatgtttgttggccatttgtatatcttcttttgagaattgtctattcatgcccttagcccactttttgataggattgttagttttttttcttgtggatttttttttatttcatgtagactctggatattagtcctttgtcagatgtatagattgtgaagattttctcccactctgtgggttgtctgtttactctgctgattgttccttttgccatggaaaagctgttaagtttaattaagttccagcaatttatctttgtttttatttcatttgcttttgggttcttggtcacgaatccttgcctaagccaatgtctagaaggatttttccaatgttatcttttagaatttttatagtttcaggtcttagatttaaggccttaatccatttcgagttgatttttgtataaggcgagagatgaggatccagtttcactctcctacatgtggctagccgattatcccagcaccatttgttgactagggtgttctttccccactttatgtttttgtttgctttgttgaagattagttggctgtaagtatttgggcttatttctgggttctctattctcttccattggtctatgtgcctatttttataccagtaccatgctgttttggtgactatggccttatagtatagtttgaagtcaggtaatgtgatgcctccagatttgctcttttttcttagtgttgctttggctgtaagggctcttttttggttccatatgaattttagaactgtttttcccaatacgtgaagaatgatggtggtattttgatgggaattgtgttgaatttatagactgctttaggcagtatggtcattttcgcagtattgattctactcatccgtaagcctggtatgtattccatttgtttgtgtcatctatgatttctttcagcagtgttttgtagttttccttgtagagctctttcacctccttggttaggtatattcctaagtattttatggtttttttttgtttttttttttttttgtagctactgtaaaaggggttgagttcttgatttgattctccactttgttgctgttagtgtatagaagagctactgatttgtgtacattaatttagtatccagaaattttgctgtattcttttatcataggctctaggagctttctggaggagtctttagggttttctaggtaaatgatcatatcatcagcaaacaacaacagtctgacttcctctttactgatttggatgccctttatttctttctcttgtctgattgctttggctaggacttccagtatcacgttgaagaggagtggtgagagtgggcatccttgtcttgttccagttctcagagagaatgctttcaacttttccccattcagtattatgttggctctgggattgtcctagatggtttttattatattgagatatgtcccttgtatgccaattttggtgatagttttaatcatcataaagtgatgcaggatttttgtcaaatgcttttctgcacctattgagatgatcatgtgatttttgttttaaattctgtttatgtggtgtatcacatttattgacttgcatatgttaaatcatccctgcatccctggtgtgcaaccttcttcatcatggtgaattatctttttgatatattgttggtcagttagctagtattttgttaagaattttagcatctcttttcatcagggatattggtctgtagttttcttttttggttatacccttttctggtttggatattagggtgatactggcttcatagaatgatttagggagagttccctgtttctctatcttgtggaatagtgtcaatgggattggtgccatttcttctttgactgtctggtagaattctgctgtgaattcatctggtcctggactttttttttgttggtaatttttaaattaccgtttcaatctcactgcttgtattgatctgttcagggtatctaattcttcctgatttaagctaggagtgttgtatctttccaggaatttatccatctcttctaggttttctagcttatgtgggtaaaggtgttcatagtagccttgagtgatcttttgtatttcagtggtgtcagttgtaatatttcctgttttgtttcttatggagcttattaggattttctctcttcttttcttggttaatcttgctaatggtctgtcagttttatttatcttttcaaagaatcagctttttatttcacttatgttttgtatttttttttgtttgtttcaatttcatttagttctgctctgaccttggttacttccttttttctgctgtgtttgcatttgatttgttcttgtttctctagttccttcaggtgtgaccttagattgtctgtttgtgctctttcagactttttgatgtaggcatttagggctgtgggcttttctgttaacatgccttttctgtgtcccagaggttttgatatattgtgtcactattgttgaattttagaatttctatcttgatttcattgttgacccaatgatcattcaggagcaggttatttaatttccatgtatttgcatagctttggaggttccttttggagttgatttccagttttattccactgtggtctgaaagagtacttgttataatttcagttttcttaaatttattgaggctcattttgtggtctatcatatggtctatcttggagaatcttccatgtgctattgaatagaatgtatatcctgcagttgttggatggaatgttccgtatatatctgttaagtccatttgttccagggtatagtttaaatccattgtttctttgttgactttctgtcttgatgacctgtcgagtgctgtcagtggagtattaaagtccatttcttaggtctgttagtaattgctttataaacttaggagctccagtgttaggtgcatttatgtttaggattgcgatattttcctgttgcacaaggccttttatcattatataatgtccctctttgtattttttaactgctgttgctttaaagtatgttttgtctgatataagaatagccactcctgatcgcttttggtttccatttgcatgaaatgcctttttccacccctttaccttaagtttgtgggagtccttatgtgttaggtgagtctattgaagacagcagatggttggttggtgcgttcttatccattctgcaattctgtatcttttaagtggagcgtttaggcaattcacattcaatgttagagatgtgaggtaccattccattcatcattatatttattgcctgtataccttggttttctgttttttgttattgttttttaaattgtatttttgttttataggttttgtgagatttatgctttaacgaggttatgttttgatgtgtttccaggatttgtttcaagatttagagctccttctagcagttcttatagtggttacttggtagtggcttctttcagcatgtgtttgtctgaaaaagactgtatctttcctttacatatgaagcttagttttgctggatacaaaattcttggctgataattgtttgatttgaggaggctgaagatagggccccaatcccttctagcttgtagggtttctgctgagaaatctgctgttaacctgataggttttcctttatataggttacctggtgctgttgtctcacagctttgaagattctttctttcgtcttaactttagataacccaatgacaatgtgcctaggggatgatcttttggcagtgaatttcccaaatgttctttgtgcttcttgtatttgaatgtcaaggtctctagcaaggctggagaagttttcttcaattattcccccagatatgttttctaaacttttagatttctcttcttcctcaggaacaccaattattcttaggtttggccatttaacataatcccagacttcttggaggctttgttcatatcttcttattctttttttctttgtctttgttagattgggttaatttgaagactttaccttcgagctctgcatttctttcttctccctattcaattctattgctgagatcttccagagcattttgcatttctataagtgtgtccattgtttcctgaagttttggttgtttttttatttatggtatctacttccttgaatatttctccctttacttcttgtatcattttttaaatttccttacattgggcttcacacttctctggtgcctccctgattgattagcttaattagtaacctcctgaattctttttgttttttcagatgtagtttcgctcttcttgcccaacctggagtgcaattctgtgatctcagcttgctgaaacctccacctcctgggttcaagtgattctcttgcctcagcctcccgagtagctgggattacaggcgcgtgccaccacgctcggctaatttttggtatttgtggtagaaacagggtttcaccgtgttagctaggctggtcttgaacccttgacctaaggtgatccacccacctcagcctcccaaagtgctgggattacaggcatgaaccactgcacctggcctaacctcctgaattctttttcaagtaaatcagggatttcttcttgatttgaatccattgttgttgagctagtgtggtttttttggtggtgttaaagaaccttgttttgtcatattaccagaattggttttctggtttcttctcatttgggtaggctctgtcagagggaagatcttggactgaaggctgttgttcagatttttttgtcttacagggtattcccttgatgtagtattctcccccttttcctacggatgtggcctcccaagagctgagctgtagtgattgttatctctcttctggatctacccacccagcaagtctaccaggctctgggctggtactggggcttgtctgcacagaatcctgtgatgtgaaccgtctgtgggtatctcagccatggataccagtaactgttctggtggaggtggcagggggcttgaaatggactctgttagggttcttagctttggtggtttaatgcattatttctgtgctggttggcctcctgccaggtggtggcactttccagagaatatcagctgtggtagtatgggcaggaacaggtgggggggcagggcctagaaatcccaagagtatatgccctttgtcttcagttaccagggtgggtagggagggactagtgggtgggggcagggctaggcgtgtctgagctcagactctccttgggcaggtcttgtcgcagctgagtatttggggtgtctccagggtcctgcaggagcaatccacttccttcaggtggtctgtgggtcctctcaggtttcccgatttattcctgcagtccttccggagcaaaaattcataatgcaagcctccacacgctgctctgtccgtcggagtgggagctgcaatctagtcctgcctcccgactgccatgatcccctcgtgcacttactctttttgtcctttttggtatggattccacaggaagctgttatgataagattgtgctgaatatattagtagagggcaacaacaacaataaataaaatacatgcttccttagcatggtaattctggatcattaagagttaggaagacagaactctcagagctttattgtctttgtatacagtggtcatttggagtctattgaattgtattagaattcagtcaataagcattcataaaataaacattgtttgaattatagtgtttttatttgcctttttatgttccctttaggagttcaggtagcatatattttcactaccttcactgcctaaaacagggcctggcacatagtaggtgttcagtgattgaactgacaaatcataagaaaaactatgcaagcgtcactggctttatctctcctcgaacttaaggaatattacaaatgacttgcaaatctatgctaattccatatgacaggagtctgacagggttgctggggacatccttctcattaaatctatctatatggctgggattggagtacttctcagtaactaggtagaatggtctgtgcaggcttttcattcatttattcaatttatctgtaacacttgcaaactcaaaaaccatgtcaactagtctcagtgcagtgaagttgtccaataaaccagtgcagttttttaaagtaatttatttgaaaataactttcaacttagagaaaatttgcaagaataggaatagtacataaaacacaactaagagcctttacccagattcacctgtttttaatatttgccttgtttgctttctatttgtgctttctctctctctctatatatatacatatgtgtatatatatatatatatacacatatgtgtatatatatatatatacacatatgtgtatatatatatatacccacaaatacacatgtacatatatatatacccacacatacacatatatacatgtatgtatataatatatttttctaaagcttttgagagtaagttgcattcctcctggttctttatgcctaaatattttagtgtacatgtcataaaaatactactctgttgtccatttaggtaaatccatccaataataccttttataattttattcctatgtgcaggatcaagcatgacatttagctgctatgtctctttagtcatctttgatccagaatgtttccacagccttgcatggcatagacatttttaaagaatatgattgtctttcccttctttagatttttttcctcatttttggtttgagtgatgtttcccatggttaaattcagattttgattttagactggactgttacataaccaaagtgatcttctcaagacacacttctgaaggcataggatggccatctctcccacattggcaaagcaattttttaataaacattttaattgaagcatagtatatacacagaaaattgcacaaataataaattgacagctctgttagttatcacaaagtgatcacactcatcaacttatcagctcaactgtccttattagtagagtttttttaataagtctggatgtacggtaaggtaagttctctatatttgaacttcttcaaaattttttggggggctattcttgaccctttgtatttcatataaaattaaaaattgcctcattaatttttaacaaaattgcctgctgggattttgattggcatcacattaaatctgtagatcactttgatgagaattgacatctttataatattaatctgattcatgaaaactggcctagccttcaattgatttaggattttaaaatttttttcaggaacattttatacttttcagcatatagatcttgaacagcttttattagatttagtcttaggtatttgactgttttgatgctatggtaaattatattttaaaggttttatttgtttgttgtggctggtgtattgaaatataaattatctcttgttgctcttatactcagaaatcttacaaattaacttattatttataaaaatgtatatgtagatttcttagctgtagatacaaatcatgccatctgtaaataaggacagctttatttcttgactcttaatccatttacctttcattcttttttactacattattgcattttttacattatattggctaggacctctagtataatgttcatcagaagtcatgataggggcatcattatcttgttcttgatctccgtgttcagtagaatttttgcggatagtcttcaccagattaagggagcacatttctatttctagcttgctacaaatttttatcctgtgtggctgttaaattttgtaaaatgttttttctgtttctattaagatgattatatgatttctttcccctttgttctagaaaagtggtaaatcacagctactgattctcaaatgttaaatcaactttgcattcttggaataaacccagcttagtcctgatgtattttctttcttatattcaatgtgctaacactctttttggaatttttggaattttgcatctctgtgagagactctggcctgcattgtaatgtggttgttaggatttagtgtcaaagtattattggtctaataaaatcagttgggaactgtttcatttttttcttttctcaggaagagtttgtacaagattgatgttttttcttccttaaatagcttaaatatttggaagaattcactgatgaagccatctgggtttgagttttctttgcaggaaggattttactataggttcaattactataacagatacatggctgtttagattttctttttattcaaggatacattttggtaggttttgatttttctatttgcttttttcttatttttttactttattggcaaaaattgttcatgatattcttttattatattttcaaagtctgtaagatatagaatgacattcacctttttattcttgatatcggttattttactattacttctttttcttaattaggttatcaagaagtttataacattttttagtcttttcaaagaatagctttgaatcctttgtattgtacatggcttttctttcattaatttatactcttatctttattgttttcttccttctactttctttagttttaatttgctcttctttttctaattaacctttttattcaatttctaaacatttgaagttatttttattattgatctctagcttaattcctcagtggtcagagaatgtactccatatgatttcagtcctctgaaaattttgagttttgcccagcatttggactctaaagaaatgctccatatgcatttgaaaagtacatgtattctacagttgtgtgtgtgtgtgtgtgtgtgtgtgtgtgtgtgtgtgtgtgtaggtcaatgtatctatttatacatttatttatatctatttatatttataaattaggtaaatgttattagtagtgttgttcgagcctcttatgtctgtattaatattttgtctgcttattttatcaataagaggaatgtgttaaaatctcccactttgttcatgaattttcctgtttcctcttttaggtgggtcagatctcgctttatgtattttgagaatttgcttttacttctgcaggcagttatggggattggatcatcctgacccaatgagctgacttgaagctggatctttgtaagagctggtctgttcctattcatcctccctgcttaatattccaaaatataagattgttcatacatgaacaatacttcttgcatatctactatatactaggtactataataggtgctgaatcatctgtgttattttaagggttatgaagagaaaacaactgtctctgagaaggaatcaccaccactaaggtacttcctattttgtctcctaatttctcaaggtttaccacttgaatccatcctacagtctactgccagactaatttctcagaagccacttttttacttcatcacatataaactcaaaaacttgcctttgttttctagtacctgaagaatagaagtagaatggaagtctttttctagtcagctgggaggatatatgaggtgctaccttatattttaccaagggtcttaatgactttcctagccacatacttgatctgaatttaccctgaggccattttaactggtagtgtcctagatttggtctttgcttaagaacatctcttaatttaagaacctcttttcagactataaagactgttctgagctttctatatttctttaaatcctgcgtgagaattagacagttctttctttagttaatctctctcttcttatatgttataggcagctagataaaacagactgatacttttaacattctttctggaaatttccttagccataactagtaattaattaaatatcttttctgttttctcagtagctgtgggagacagttttggcaaactttctgtaattacataacaagggttgcctcttctccaggctccaataacatttccttcatgtctgtccagtgtttactgaaagtattctcaaggccttcttagcttctacctgtcatttggccccactgccacatattttagctttttgttatggaagcatcttgctggctgtagcaatttttattttgatttctgttgctgcataacaaaccactccactaatcagaggcttcaaacaatagcaatgtattatttctcatgtttctgtggttgaatggcattttttttcctgctttttttcatggagttcagctgtgtctctagtcacgttgggggtttgatggactggaatctccaaaactggctcattcacctttttggtaccttggtgagaatggcaggaagattgggctcagctgggatgctggaatagctgggccattctcccactctccatctagtcccagagctattccctctccacatggtcttcccagcagggtagctgacttctttcatctggctcacgtgcaaatggcactttatttgccatggcccacagattccctatgaaggcttttttagatcccacttctcttggccaccagtgaaagaagcaacaggcacactggaaagaaaaatgcagtcagcttttccagcttctgctttgagaataattctatagatatttaaagattacttgggacattcgtggctcctctcagttgctgatatttgagacattttctaaaagtatttccaccttcccaaaagtgagtgaacaaggttgaaaagagaagagaaatgggaatctgtttaaatgaatttgtttgcaaccctaagaaaaggtttggcaaagtggataaattataactattaactaaatgatgctttggtattttctctgctttaaaaataccctgtacttatataggtcttattttctaactggcaaagcagtttatcattagctttttaacatccctaataggagagagaaggtattttcatcttaattctgtaagtctggtagaagaagaaaagctaaataacttccctaacgtgattggggtagtaaaatcattcatctatctagtcatcaattcatttaagaaaatcatccatttttccaatacacttcaggaccccccctgcagtttcactttcttcagtttcagtgactcatggtcaactgtggttcaaaaataggtgagtatggtacaatcagatattttgagacagagagagaaaggagagagaccgcatacacataacttttattacggtatattgttacattgttctgtttactattgttgttattaatatcttacggtgcctaacttataaattaactttaccataggtatgtatgtacaggaaaaaacatagtagatagagggttgagtactatctgtagattcaggcatccactggggggttttggaatgttatttcataaggaggaactactgtgtattcattgattactactatttaccaattaccactttcaacatatatttcgtgattccccaggtactaagtatacagtagtaagagaccattcctgaagcttatattctagagaatgagcagaaattaatcaaatagtcactcatactcaaattggatcatgacatgtaacacataaaagcaatcatgaatacatgttttagagatctgtgatctatctcaggggttcaggaaaagcttttctgagaagtgccatggtgcgtctcagtagattgaattctagaaggatgttcaggcagaaggtaggttgtgtataaggcactgaagcaggaaggagctacatctttgggaagtggagtggaagccagtgtggctagaggttagccaacacaggccagtaagtctggaggaggctgagaagaccgaatgagaccccacatcttaagggcttttggaggtcacactaataagccgtatgactttaggtaacctttctaagcctcagttttcttacaagggagataattttcaatatctatatggtttagctttgtgtccccatccaaatctcatcttgaattgaaatccccatgtgctcggggagggagctggtgggaggtgattggatcatggaggcagattttcccccatgctgttctcgtgatagtgagtgagttttcatgagatctgatagtttaaaagtgtttggcaggtcctccctccatcccactcccgctgccatgtaagatgtgccttgcttcccctttgccttctgccatgattgtaagtttcctgaggcctccccagccatgcagacctgtgagtcaactaaacctctttcctttataaatcatccagtgtcaggttctttatagcagtgtgaaaacgaacgaatacaaatatgctaaaactcaagccctgacttttcctctgagctctaagtcatccaatgccaatttgatgtattcattttgataccaacaggcatattcaactcattttcacaacagaatttctgattcctgcagctccatgccctgaagcctcctcctcatctaccttccttcattttagtgaatgtctccattcttccattgctccagtcaaaatctcaggaatcatcctcccgttatcactgtccctcattttccatatgaagtgaatcttgttggctctgatgccaaaatagatcacaaattcaaccatttccaccatctgcactattgtcactgtaatctcagcctacatctcttctcatctgtattactgcagtagcctagctgtctccctgtatctactcttgttcttttataatccattatccactcagaagccagaatgtgctttttataatgtagattttcatgtcacctctctatttaaaatactcctgtagtttctcactacacttaaaatgaagtccaaactccttagaatcactgaagatccttggatgagcggtctctgcctgtctttctgatagcctcttgtacctccgcactcaatgtactccagacatgctggccttctgtttgtttctcaaacatggcaagctcactgctgatctttatggtatcagatcctgctcatcaactggtcttctgccaaaaaaccacattctcagagaagcttctctgaccacctatccccagccctctggctggatagtcactctcccaatacctcatttgagtttctcaatagcaactaccattctctgaaattatgtttacttatgtcttgctgccctcattccaacttccaaatataagctccgcaagagcaggaccttgtcaatctgatcctccttgcttagcaaagtggcatagagttgcagtgcaattcaactatttgttggctaagtgaatgaatatgtggatgaaaccacctcacaggggtcccattcatctcaagagtcagaatctgtttgcctggactgcataatctggtttcatggataagacacgctgaaagctgccagtttttgactagacaagtatttcattaacgtagaccatttcaaggcccaaatccatttcaagttttgaggacccaagtccattgcctttagtgcaattcggggactactctcaacatcataatctgtatcagtaaactcatccaaattcagttatttcaccctgctgtgagttccataatagtgggtaacttattcccatgatcaacttaaaacaaacataaaaggactcaggaaaaccatctgtcagagaagcacataaactttcaagcaatggtttaaaacatctattgattgcgcaatggatgatttgtaattacagaatacgcatttggtaaataggtctttgtggccctttgaactctttttattgggttaacagataattagggtctgttgtgtagatgctccataattgctcctttggagcagttaaagtttgcggaatggatccccaactctgctatttctttgttgcatccctccagctcctaatagagctagtgagaagagctgggagaggctcaccctggtatttaggaggcagctgttttgcattcaaggtagatctcagaagcagcaacctgggtggcagggagggcaggagagagagttggttctataatcccagaggctgtcccagctgcccccgccagccagccttgggcatagtgtaaattgctgctgctttctcaccatgtgtggaccaccaacctgagctgtgtgagcctcagcactttcttctctgggtaagtcacatctttttcagatttcagttccaagtatctgttcccaggctggtgctgcatcaacactacctcttttctcttcttttctttatgactcctactttgagaagtagtttcaaatactcattatcaagttctattcatctttcagactcaaaaggtttagaggctgggctctggagcctgatcctgcttgagaggctgggctctggagcctgatcattctgggtttgaattcaggctctggaatttactagctgtgtgaccttaggaaggttgcttaaccctttctgtaaaccaaggagaatagtagtagttgccaccttttagtggacactagctaggtgccaggtaccatgctatgtattttcatacatctctctcttttaaaaaaataagaactaattttttttttttttttttttttttttttttttgagacggagtcccgctctttagcctaggccggattgcagtggcacaatctcggctcactgcaagctccgcctcccaggttcacgccattctcctgcctcagcctcccgagtagctgggactacaggcgcccgccactgcgcccggctaattttttgtatttttagtagagacggggtttcaccgtgttagccaagatggtctcgatctcctgaccttgtgatccgcccgcctcggcctcccaaagtgctgggattacaggcgtgagccaccgcgcccagccagaactaatttttttaaaaaaactattatctatctccattttgaagttgacaaaaatgccttgggagttaaacaacttgctcaaggctagaaatcttctaagtggtagagacagggtttaagctgaggcctaactcatgtgcttaactgttatgctctcctctctcctgacagtatccatttcctagagttattttgataatttgataagataacatttgtaaaacactttagctcagagctaagtaaatgttcactaaacatgagctaatgtgattggtcttctcttcttgtgaagctttcctttgctccgccctgaccaaattagttgcccctttctctggcttctatcacatttatacattttgtcctctgtaatatctgaactgtaactacttgtttacctgtctgtctgttctactgccaagtacaatgttaagcgcaatgaaagagctccaagaaaatgttttgaataatagtagtgagaaggtgaactttataattcacagatatgtaaagacctagagtcccaagagagcacagcctgttcaggacctgccttaagaacagcatgcctgaataataagaggtgggccgaggtggatggtgagatatgggaagaattatacgagatgatgctggtgaggtaggaaggcctcataggccatgttacagtgtggactttacctccacaaccgtggagaatgatggaagacattcaagcagggtttgtatgattagatttgtttcagaaagatcactctgggtaaagtgtgaatggattgggggtgaagtggagcaggcaccagaccagaagcgaaaagttgcttaggagtctcttgaagtggcccaagcaggagatgatggggcctaggtcagggaatggtcgtggagtgagatttcacatgggtgaagaagagagggtaaattccccgtgtctagcagatcctgggacttttattcaagcttggaaaaatcctgtctacccctcaataccagataagaatcccaaatggctgttgtttttggaataccacttataatgtgaattactttctcatttgtttcagagactaacctatgaaaaagcaagggctatggatcaagtattctttgaagtgccctgttcacttcatggttctgtagagaattagaaaacttccaggagtttccaagaatgctgatatccagttcaccactttacccactggtgaggagaagaaagtcaaaggaaaccatatgtcttagaccttagtctccactggtgacctctgtctaccttgaccctttctctatcaggtgacttctcttttctgacctttcccctaacgtagttttagatattattgctttttcaaatccagatcaataagaaggaagagagctttccccaaaatccctgggaaaagttctaggctgcatcagacacacccttccttccaaacaactacaacagttaagaaagcgatgtctacttggagtatagatgatagccagccatgtgtgttaggtccctgcagaactttcccatattttttcccttaaaataatcccaagtcactaagatactcaaagatataggctctgttgatgcacatgactttgcatttcctttctttttctttgtgctttgagtgagaagtcagtcagaaaagaggacaaaaaaccagatagatggctgtgtttatgatgcacaaatacacaacataagcataccagcttagtcaagggaccgatggacccctcggggggcgagctggccctatttcactccttgctgagcctctgagtgccctgggcttgaagcccagttaaacgccttgtgaaaattgcccacatgctgtccaaagtctgctccttctgcaagtttagcctactaaactggcggaaacacccttagcttcaatggggcgatactgaatttaaagttcgagattctacaaggtttaacaatttttgaagcattttatatatattagcatacatcttctccatgtagatcctgtaatataggtattgtgagccccatttaacagatgaaaagactgacactcagagaagaagttgaatatgcatttccaaaggtcacacagcaattaggtggttgataaggaatcaaacttagagtcactcaacttatgaaatagttcactggcttctaatatagtcaggcagtgtatcaggcactgggaatacaatggtaaatgaagagatatgaaattttccctcatggatcttatagtccaattgaagagacactcattagacaaagtactcaaaacaacagaaaactgtaaatatggataagagctatgaaggaaaaacagggtgtaatttagacgtggggtgtgtgtttgtgaatgtgtgtgtgtatgtgactgaacaccatttataacatttaagagccaagaaataggaggaaggaatatgggagaagagcaggagtatgaagtttcaacaggagatgatagtatgtataaaggcaagaagaacttggtgtgtttgaagagctggaaaaggctgagtgagtgtggctggaatagagtgggttaggaagagcgtggcataagatgagatcagattactggtaagctaggctaaaacatttagccatgggttttattccaagggggcaaaatgagaagcaaggagaacaattaggacactgcaataacccaggaggaagatgacaactttatgtttccaaattttgtaatttttggtatggtatgtgctatagttgtgatctagagaactgtctgacagttgagaaaggttgttctttgccatactttaaaaatcacccttaagttttctttacttacaaggtgttgagagacagtagagcccttggtacattcaagaattagcaaagattttagccacacggttctagaattaagaaggccatctcttcatgatcaaacaggctgcacaatatgccacacaagtgacatttgaaaaggaaattgaccatcggaactcttaataactggtcctccccaataagagatgctccaccattcttactagcgatgtgacaatgggcatgctacttaaacttttttgaacctaattgacaccatttgtgaaaaaaggatagaagtagtactttactcatagaatcatactgaaatgggattagatttagaattggattcatgggaagattaaatgagataatacacgcaaagcacttaacacaatgcctaacaggataagcattctgctttcaataaataatagctgtcataattattaataatgatacttttacagtataaatgtaataagattagataccagcatcacttctgtggaataattaatttctgtccctaggcaaagtattgacatatgtagcttaatttatgaaaaatatatatcctgtgtctccaaattattttaaaatgctttgaaatgcttggatgaaagaaattataaaaacatcacatatattattccaaagagaaattgtatcctacagagctagactttccctaatgactacaggccatcttaagaatagcctgttttattatcgaactgaacagttggcagtattggacacaattacagattctgctttagaaaaaccaacgttaattggatttctgaatgccatttgaactacagagagagagaattcttcttctagctccgaaatccacttacttttagcagagcacactacatggagttttagctctcctaatggcttcaggtaaacccagaactagagcattagcttctcagtggaggaaggatgtatcaagtatcgaatgcacagggctgcgatttatctctctccaattctgctaaagcaaatgtcctttgaaaaatgcatctgatgagagtgtattgtaagggagattcctgaagatcatctccctttctaaacctctttgatctgagattaatctgaagatggctcagaagatctgagagttacctaaactccagcgtgtagcctgtgtgcctccttgaccatgtgcctcagtttccagagatttatattcacaaacttacagatcagtcaaaagtaatgaaaaaggaatttagcctctaatttctatgtcttaagaagaagttatgaggatgtaacttaccagctggcaacacttttcatatgtccttttctgtctccccaactctcctggacccatgttgctccacagcccctgtttactaacacctcccactcccaccacggaatgctcctccatctcatttagctttttgtctcttacccagtatttagattaacttgccctttctccctgccttcttttctgtaacctgaacctgtgatttttctttctttgcccattgtccagtttccagttctgtgttatggatgtcaaggggtctaactgacagaggctaagtctccatatggaataatgttcattcttctttttttgtttttttgttttagactggatcttgctctgttgcccaggctggaatgcagtgatgcaatcatggctaactgcagctcaacctcctggattcaagctatcctcccacctcagcctcccaagtagctaggcctacaggcgcatgccccatgcccagctaatctttttttttttttggatttttcgtaaagacagggcttcaccatgttgcccaggcaggtcttgaactcctggactcaagttatccactcaactcagcctcccaaagtgttgggattataggcatgagccactacacccagccaacatgtttattcttaataagggctttatatttggttctgtgaactgctctatacagtgctggattatagtgtgctgtgggggtgggacttggatcatcgggttcctcgttggttgtattcagtcccagtttggacacaatccccaagttctccttggaaagaattggagtgggacagggagggaggagggggagggaaatgtgagtgaatctggctgtgttgatactgatgcaagcttagaagtatgaaaaatagtatctgccatcagctgaggtgcagagaaaggaaaaaatggagggaggagagattggtaagggagaaaagggatgaaggtagagggcttcagtaggtggggcaagaaggagagcggggaagacataagatgcagaaagaggcgagagacctgtcaaaaagtcaacaatccaactccattgctctggcagtagtcacttgattcacagtccagggaattgattacaggggcatgagtggtatgccaggaacctgtttctggatggagatttggactctgatcaaaaatgtttcttggctgtgaatagttgaactaccctgctaggaatatggccccagataatgagcaggtgggatacactcctcttttttccacatccattttattatgctttaagcacatgccatggccatggcccagcttctgagagatcttagcccagaatatatgcttctgtggtgagctaatagagattaagctgaggttttcttagatgttgcctctcattccaaagtaggtcaagatttcatgattgccatccttgaatggactgtctgccttttttttctttttttggaaggttggaagaagccttggagggcacacagaagcacttcctccttttacaaacaagaaaagggacagagtgacaactttaaaaaaatctacatctgaagttagttctatagtttcctatctccagaagaggcagaaatgaactccaccatgcctaaagtttggttagtagaacacaactaatgacaaataacagaatacagagcacctcattttccattgtccttttccatactcagagcaatactatgacagtacaagtggggctgatctatttcacagaagaagaaactgaattcagactgtctaaaatccacagacaaggcagagagggacttcctggttcagacacactactccagaggaaatgcttgtgccactctaaaaggcagcctcctccttaattgtgtaaatggctttacttagttctgatctctgtggtgctgctaaagttgaacaggacaaagtggagccttgttgactcactgatgctcagttttaatattgataacagaggtcttcactgtatccaccatctgtagagccactcaaagtgcaaattgcacagtaaagagatgggttaagaggacaagaggaatggtgagaaagaaaaaattaggccatcttttttcttgccacggggtcttttgtcctgtttcctttcattgctgtttcctctagggtggacctttggtggccacattagtgggagcatcgagaggaagatgctgtggtatgtcagtacccacacatcgcctggctgctggctggtagctagccacttaggacagggaaaatcgcttccttcttccacttaagtgggactccggactcctagggataagtctttagcacctactgtctgaatgcctcagacactacaaataccaggaaatttcaagaggagtctggtctatatctccttttttttttttttttttttttttttttttttttttttttgagacagagtctctctctgtcacccagagtggagtgcagtagtgcaatctcagtcactgcaacctctgcctcccgagtagctgggattacaggtacgtgccaccacgcccagctaattgttgttgtatttttagtagagacagtgtttcaccacgttggccaggctggtctcgaactcctggcctcaagtgatctgcccaccttggcctcccaaagtgctgggattacaggcgtgagccaccatgcccggcctggtctacatctcttctgatacacatgacaggatcaaagcattgatcatgtgtaaatggttctagaatctctcttagcaccaccctccacagaggatgctatctttgactgctcagtttcttccctctgccatgttgaccaccttaggagaccagtgagagtctctaccttatcttgaatcattcccaagctccaaggactacccacctccacatttaaatacttgtttcccctgacttcctgattggcctgcttctcccaaactttctactttctcctccaagttataattcttctttttttttttcttttttaagttattaggtcacaattcactttttttaatgggcaagtgtaaatgaggaaaactagtagattttttttttccatccacagccaagtacagcttcaagacagctcagtgctggtagtgaaggagtgcctgagagaatgggaatgaacctcatccaataaaactgggctgttgtttttggatcacatgctgtgaattgatttattgtttaaagtgatgaaaaaggtgttcggagacttggaggagagttttgctctgcggtgatgctcccgcagtcaggaaacagtcttctgagccattcagagctaggaaatatggggttattttggtagctgtcagcaggaattggctacagtctgtatgttaaataaatacaaactgcctatttaattatttaacaatgagaacaaacgtcccactgttggcaagaggaaaacagtcaacactcaaactatgtagaatcccatctcattcccatgatgtgatttgaccctgtttgcacccacaggcttggctgcaaccctccagggcatcttatcactgttttattggagttggaacgcggctggaattggagtacaaatttccttcagcaaggaaatgctggagaaacaagagcaagttaacctccaaatgggttccaaggcaaccgctgtgttgaaatttcacttgggttcccctggctcttttttacctgcctctgccaaattgttgatgccctcgcctgttggaaatggatgactttgaacaacgaggggcaaggagcctctcttttacttcagaactactacagcaagaattcaaactctttgtttttgagaaaatagctcctaatgctgtgttgattttaccgtgtgcttcagaaaaagacccttaaggctaattgatatgaacatatagaggcagtctgagcttaccagaatttatattacctgatgtgttaagaatcaggaagctatttatgctagcctatagcagcaaccctttgtatttagtgtgtttgtgtgtacacacatacctgtgtaaatcaaaatgaaagcttgcttttgtgatctagcacaagttttgccatatcatatatacatttttaacttttggaaggtagaagacaattgataggcatttaacatgaagaaaacatgcatttatagtcaatattaatagaatagatggtactaatctataacagtgaaaaataaagaaggtagaggaaggaggacaaagacagagaggagacaggggggaaaggagaagacagaaaaaagaaaacctcaaaacaaggactgctctgagagccacaactgagttttatgcttcttgctgtcatctttctctaaccttaaagggcagaaagcaattgggagaactaacctgcacttagatttcagcttccataggatgttacattctcagggtctattaaatcgattggactttgaccttagcttccacgaagtccttaccttttgattggggctgagaggtctgatttaacctcatggaatttgtattttttggaggaactcctgcctcgtccgtacatggtgaaacccccaacagcagcatttttaatttccagattctcagcagacacaatgcacagactgtagaaaacacctgctcatccggaccgctcagctcacaggctccttcctcaggggagcatctgatgctccaggcaaggcagaccctcttcttatactcttgtgacctcttagacttttcttttgtagcacttactccagactctaatcatatttatgttgtgattgtttatgcaatggttttcttcctaactaggctctgagttccatgagagttgcaatgtctgcatcccttacccttgttgatatactgcactgtgcccggtacctaagtaattgctcaataaatatttgttaaatgaatgattataatagtatgcatatatgcatatatagtatgataatatatataaatatgtgtaaaacagtatatatacacatgctatattaatagcacatcatgtaatattgtatgtctacacacacatacattcagtatttactcagtttttctgtataagtaccgcgcgctaaccgattgcgccactggagctctagtatttactcagtttttctgaggcttatttactcattggtgaagtgaaagtgaatgtaaggctctttgcaaaccccaaagtgctagaccagtaggaaagatcagaatagcctttcatattaaacactatgaagccaggagctgtggctcccaactgcaatcccagcactttaggaggctgaagtggaaggatcactttagcccaagagtttgagaccagccagggcaacacagggagataccatctctacaaaaaaaaatttttttaattagccaggcatgtggtgcttgcctgtggtcaagtagcctcagctactctggaggctgacgcatgaggaacacttgagcccaggaggttgaggctgcagtgagctgtgattgtgccactgcactccagtctgggtgacacagtgagaccttgtcttcaacgaacaaacaaacaagcaaaaaacactatggtagagaccccagtaaatgccttccatgcttataaaatacatttaagtatctctcaatcaagttttcagtattctcaagtcagtctttcattctaaatttagagtcatttccaaatatagtgcatttcctgtcccattccttccctgaaagacagccgtgtccaactagaagtgggcctgacgcctcttattagcccggttgcatttctgtctcgctcttggctgcagtgtgtgagctgatgggccccacgtgactgtgttcacgtccaagcttagtagaatgaatttttccagcatgatttgcaagtcacgctatcacatgcctcctgagtccagctgtgccgcagctgccgcctcccctgcatccgctcatcttgcacttggatcaaaagcacgagcacatttgcctgaaccgatctggtctcggcccagctgtttgttccccattgtcatcaggatgtttacagacctgctgttcttgctgtacttgtttcatgatcacacttgggtctgcagagcattttaacacatggctgtggccgaagctggcaatttgactagcttttcttggtcactgagacttctctaaggcatttccttcaaaccttcctaactatgtgtatgcttgcacatttccacagaggcaacaagaaaaggaaccagggctataaatcctgttaaagatgggccatgagtgtccttctggcctactaattttatcacgattagtttctaactggacaagagagcacttccagtctgagacaaagccagattaaaggaagaaatctattcttcttactctaatttggtaagttgggaaaatatagtttaccttcttaggaagttgtcttgactgctcctaaagtgtgctgatacctgtcacatgacagcaggtattttcttggcaagaattgtgctggaatagcagttggcagtgattgtggtgagggcgtggaaaggtgtctagtgggtccaagtgaggttctaggtctagctgacccctaactatgagaagaacatgagtgagtcattcattctctctgggattcaatgtcctcccattaataacaggcaccacttattatcatattaaaacctgtacttaaaaatctgttttctagactcaccccaaagatcctgattcagtaggctgaggaggtgcctgaatgtccctatattttgatgtatcacagtgcatggtcagcaattcactgtctcccctgcaactacagtgagccatctgacctaggatattttatacttttaatcaaatgctctttcatgataaataacatggctctgatttcccaatagctcaagcgttaagagaaagacagttctgcaatgcaaagcatcctaggctcatctctgtgggctgaggccacagagctgcactgtctactacagtggccatgaccacatgtggcaactgagtactagaaatataggtgtctcgaactgggatgtgttgttagtataaaatatgcaacagtttccaaaggtttagtatgaaaaaaggactgtgaaaatacttaataatttttatgttgattacatgctgaaatgatatttttaaatatatgacaggttaaataatatatagtactgaagttaatttgatttgttttttaatagttttattgagatataattgatatattaaaactatgtacgtttaatgcatataatttgaagagtttggacatatgcatacacctataaaactatcaccacaatcaaggtaatagacatctccatcacctttaaaagtttccctgtgtcctccctccactgtttttttcctttttctttgttttgtgttgtttgtttttggcaagagtgcttaacatgagatctaacctcataacaaatgtttaagggcataatacagtaccattcactatgggtgctatgctgtacagcagatctctagaagttatttctcctgcataaccaaaactttatatcaactgaacaagtcccaacctactccccccagctcagctcctggtagtcacttctattttctgcttgtgtgagtctgactattttaggtacctcatagaagtggaatcatgcagtatttgtcttctgtgactggctcatttcacttagcataatgtcctccgggttcatccatgttgtctcaagtgacaggattttcttctttttaaaggctgaataatattccattgtatatatataccatatttttttatccattcatctgccagtgaacattttggttgcttccatgtcttggctattgctaatactgctgcaatggacatgggagtacagatatccctgcaagattctaatttcaattcttttgggatatacccagtagtggaattgctggaacatatggtagttctattttttattttttgaggaaactttatactgttttctatattggctgcactgttttacattcccactaacagtatataaaaattccaatttctccacagtctcaccaacattttaatcttttttgtctgatttatttatttatttttgagacaaggtcttgctctgtcacccaggctggtgtgtagtggtgtgatcatagttcactgcagcctcgaactcctggactcaagcgatcctcccacctcagccttccaagtagctgagattttacgggcacaccaccatgcccagctaattttttaattttttgaagagacggggtcttactgtttcgctcaggctggtcttgagcttctggcctcaagtgatcctcctgccttggcctctcacagtactggcattacacatgtgagccactactcccagccttgttttgtttttgacaataaccatatcaatgggtgtgaggtgatatctcactgtggctttgattcacatttccctgatgattagtgatgttgagcatcttttcatacacctgttggccatttgtaagtcttctttggagaaatttctattcaagtcctttgcctgtttgcctgtttttaaatcagattatttggttttttgctactaagtcgtaggaacttatttattttggatgttaatcccttatcaatatatatatagaaaatactttctccctttctgtaggctgccttttcattctgttaattgtttcctttgttgtacagaagctttttagtttcatgtagtcacattgtacaattttgcttttgttgtttgtactttggtatcatatctaagaaattattagcaagcccagtgtactaaagcttttcctctctctaggagttttatggtttcaggtcttacgtttgagtctttaatcaattttgaattaatttttatgcatacagtaagataaagatttaatttcattattttgtatgtggatatcctgttttcccaacaacatttgttgaagatactgtccattccctcttatatattcttgacacccttgtcaaagctcagttgaatgtatacctgtgagtttatttctgagctttctattctgttccattggtgtgtatgtctgtctttatgctagtaccatgttttaacaactgtagctttgtaatatattttgaggtcaggaggatcatttgtttctttttactttttttctttagtgtggctactggaaaactgaaaactacgtatatgtggcttgcattatgtttctattggatagtgctgctatggagcacaaggcaattttttagagacaatgacatcctgaggataaaccatactgttaccatatcacagtagccttacaaagtgacccacagtaaccctgttggtcctgatcaaaccctagctcccagtttccattttgactgataaaatttagaagtggaagcttgaaaagggattggacagaaagtgggaatgtactgtttactaagtccgtgagtgctgctccttaactcatatagcctgcttggttccagttgttactgaaaagcttagaagctttatccattcccattatagaccagacttccccatcctcccagtacactcttctcattctccacttcaccccttggcaaccaaacatcagactatcttcttgatgctttgaaaactattaaattagaaaaaaattcaataatagtacccattataggtaaagatttggggaaattgggacacttgtatactattggcggtacccaaaattataacttctttggaaagcaatatcacatcatcttttaagacccataaaaatattcttacactttgattttgtaaagggtaggaatttttctcaaggaaacattcaacagaagcaagataaatggataaggatattcagtgtagcattatctatactacaaaattagaagccatttaaacacctagtcattaaggaacagttaagaaaattatactgcaacaattcaatacaattttatatattcattcaaatttataattgtgaagaatatataacaacatagaaaaatgtttaccagataatgttagattttataaagtagaacacataaattgtatgtagattatgattgcactgtaacaattatgcatgcataaggaagagggcttagaataaatgcacaaaaatgaaacctctgtgttaggattattaaagaataaatcaaagcattttagctaggagacaatggcctctcatgggacccagagatgggcccccacagtgtccataaaacaagtgaaaacataccatattttgtgtggctgtgcatatgtttatttttttgagaagtacgagcacagctttcatcagattctcagaggagttcgatgatcacctccctcccaagttaagaaccagtgcttaatgatggtgctattacattattgtttcaataattaaaaggaagtgagttgtctcctcttttggcctatactcaaaggtgaattcaccagtgggcttgaggaagaatgagagcccttaggaaagaatgagtctggccctggtagcttgtggaagaaacagtaaccccttaggggcccccacaccttcccatttaaatttctgctctcatcctcactcagccccttctgtctcaaggccaaatgctggtcaaaatgctctcccttttgccctcctctctccttcccctccttctctattcctctctaatgttccatatcagactaactctccccaacttccaggcctttctagtcctctaatctgagacacacatctatgctgaaggacctgccaatgctaatggattaccctaccagggacacttgcctttcaacaggcgtgttgggcaaacaatacctttactccatagcaggttatgtagataggtgttcaaaaaccaggatggggccagagccagaatctgtgtgggaggaaccactgcgctgcacccctcagatcatatcagggctgcccacgtcactacacatagacgaccactggaaggattctttgcatttgagaaacatccattggtgagtcctggcatttttctcccctcagggccagttaaagaaaactccagtcagggttgttttaagggacctccacagaacaaaaacctggtcaaggactttgctttcgggcaagctttaggtgtttctctcttattcatctaccttaccagtgtgtggatctgttcactctccaccccacccctccttcctgaggccccagctcgcccttgctggcttggaaattgatgttctctcttcatgggaagatttctttcttctgagattctttcttccaacaccctatgcagtctccagggtttccttgagctgcaggctcggcctcattcatcggagtgagacttctttaatgttttctatttagatcctttgcctgtaaaagattagctattctataatggacacctacaaatgagctgaataaaaagagagagaaatgaacattttttaaaaagtagcccagcagcttcccctctgagaattgccaccaactttatcccctgttcacttattaatgcctctcttcccgcacttctttttcccctgacattttggtgaaagctttttttttttctactctagtctaacatttattccttcaacttttctgtcagacttctttttccctggaagcctttaaagatatgacgatcattatttttgttttttcatgtagataagcccctttctttctcatcacaaattcaacagaggcctaactttcaggcggaacggccctccaaatacaccccagactgctgtctcttgcttatccctaagcatctcctagggatggcaaggtgacattatactttacttcaggattcatttccatgcatcactgtggtgagacttaaaacattcttcttcgtatctggcttaagaaattgcaaccaaagttgatgtctttcatcagatagcagtggacatttgggggagtttgtcaccatcaccttgaggttcctggactgtgtaaagatcagtcactcttacttgttaagtagagagattttaggatccatgagaaactgggggttaggtcaatctgagctgtatatcccttgaagaagaaacaaaagctcagtttccccaccagaaaaacaaacaaacaaaacagaacacaataaggatccctgtttcaatgatctctgcacacatattgcacgtggtatagagaccaattactgttaccaaatgtctcctttgtcttctgtgctctataatagagtcttggatacttagctgcattcttattatcctggaataaagattgtttcccagtctccctggcacctaagtgtgaccatggagctaagttctggtcaaagaaatgcaagtggaataggtatatggaatttcctggaagtttctttaaaataaaggcttgcacttctctattcttttgtccttcatcctggatagaattgggacacaatgttgggagctcctgcagccattttggacaactgaggatgaaatccacaaacgacaatttaacaaatagaaagagctcaagtccctaatatcatagagtaccataacttccctaggttgcctccagctgttggctagaaagagagaaagaccttttatcttatttaagtattatgtttatttctgttgcctgcagccaaatataacctaaacaggatccacactcaataagtacttaatacatgatagttgtcacttaagccatcacctacaaattttggagaaccacttctcccaccacgtttcaaccctcccacaatatggcagaactttcagatgcatcttctataattctaacatatactgagtattaattatgtcccaagcaaagtaacaaatgctttatgtggaatatctcatttaaactttacctcaactctatgaggtaggtactattttttaatccttaatttacagatgaatctattagtttgttagggctgccatatcaaaatattaaagcttgggtggcttgaacaacagacatttattttcccatctttctggaggctcaaagttcaagatcaaggtatcgacaagttcggtttcttctgagtcctctctctttggtttgcagatggccacctcttactgcttccttgtgtggtctttcttctatgcctgcatattcctagtgtctcgttttgtgtccaaatccctcttccttttaaggacaccagtcacattggattaaggcccaccctcatggtcttgttttgtttctgtttttgaggttgtcaccatttattgttggcgaggacttcacagcctcattttcacagaatcacctctttcaagtccttatgtccaaatacagtcaccttctgaggtactgggttaggacttccacatatgaattttgaagaaacacaattcaccccgtaacaatgaagaaactgaatcaaagaaaaattaaataattcaataactttgcccaaaccacaggtaggaggtggtagagatgggcttcaaacccaggaagtctggcccctgagcccatacaatcaaatgctgcagtagactgccttccattccttgttatcatctgtatgatatttagcttgacagtaagcctgggttcccagaactgtttgtacgcttaatggtctaagttatgttagtctataagcatagatttgagcttatagaccctttctattcagtgaagtgtgcctaggtgatggactagggacccagctcaccacaccacactgccttatgactctgagtgctgcaggaattctgaacaggagctgtcaaagaagagtaacaggaaggtccagagttaacttaaagagaaactggcatttatattagatttaaagtttatattatggtattaatataaggattccagaaatatgtgaatttcgaagcttggaggggtatctttatgtaattacccttatcttttgtcttaattcctacttgtcacctgctttttgtactggagacctttgccctatgtcaccacaagggtcctggttgctttgttcctccagctccaagggaaatgcatgcacttgaacactccaccttgtctcttctggcatcctttatacaatgttacaggaagaggcctaaccatgtctgcagatgtcaaacagacgctacaggattcctctacactgtctgacctgcaccgtcatatggggtaaccctggaagcttgcagtgttcccaaaccccaagactcgaatctctttttcaactccagcatcattgatgggaggcagagtgtccctgtgtccccagcaccatggaccctgggtgctgcccgatgccattgctccctttcctgatcttgtattgttccctaccagacccttggcttctagtgctccatggcctgtgtccatcatggggatcattgccctggcacttcctggagcacaagtctctttggcatccctgtcactttcatcaccacagctttctcctctgccacttcctgtttgtcctagaaatggagaatagtggatcctaagtgctttacatatattaactccatgaatcttcacaacaacactaagttactttccacttctacagaggatgaaactgagatacagagagggtaagaaatatgtctgaggccacacagtaggtacatggccaagcaaggacttaaatctatgaagcctatcttcagaactcagctctcaaccattacacactggtctccactgatcacaaatcgaactctctttttccccagggagggtgcagatgcagacccacaaacacatatacatacacgccaaggactggccttgttggatgagtctaacaggaacccatgcacctaattcatcaaaagagctatatacaaagcttattgcccatgtaccattactttatatccaacaattttcaaagcaggggatgctctcaaggtcccagaagcatgccgggtactttcatgcctattatctcatttatccttacaatagcattctgaagtaggtactattatctccatcttacaggtaagaaaactgaagctcagaggggttaagcaactcgcactaggtcacacaactaataaggagtgaagccaagatttggacataaacctttctattcagtgaagggtgcctaggtgatggactagggacccagctcaccacatcacactgccttacaactctgaatgcttcaggaattctgaacaggagctgtcaaagaagaataacaggaaggtccagagttaacttaaagagaaactggcatttatattagatttaaagtttgtattacagtattaatataaggattccagaaatatgtgaattccaaaataaacttgagcttatctctggagtctcacctacctcttcacctctcacttgccaaaacacatccattgaggaaactcaacctgaaacatctctataaagtatttgggttggaagtcaattccataaaatctgcacttactaaaaccttttctctgaaaatgtactaataatatatagctagaacttgcagacaatgtcatcattgttatggagatttgtagccaaaatattctattttgtagaggttttgttattgcccagtgatgacattttttggacaatttttaagagaggcagatgttcatctatttgctggtttttcctagcttacaaagccaacaatgatttagacccaaattgcttttgatcttcccaagtacctcatttttattattaagggacttacagtacaaacgatctgtcatttgagcaggaacacccatatgtcagatgtggtcggtttgattagtggtgctaaacccctgctagcagttaaaagaggtgacttgtagaagtcacagtgtggttaaagaattctgggggggctctctttgagaaagcccaatacacaagaattctaaccagcaaagtaagtgaattgggggtgacttcctgctgggttccagtggtgatgtaaaaatacacagaactggcatttcattgtggattctaacccagattctgcttcatatcagctgtgaggccttggacaagctacttagccactttaaacctcagtcataacctctgggcacatttaatatttatgttttaaactgttatggggtaacaaattttgacatacctagtatggtgtctggcacaaaatagctattgaaaatatttttcagtcttttaatctgaaagactaaatctttcagagtcaattctgaatttgcattttaaataatttttcatctaaaagggcaaaagcttaatttacatgcatttctctaagaacatatctgttcatcaaagtaaaaagggaaatcctgaaagtctgtaacagatgccaggaatatgtgaaatcctattctcaatttccaggcagttgcctgcctaacgacttggtgttagttggccatgtttgatactccctactaaagacttcaggggcggtgggatttactaactatgaggtgagcagaccaccccctcactccgtatcgccaaggagaaaatgtaaattgcccattgtcattgcttagttcagttcagtttagttcaatgatctatgggcaagacaatgcctgaggtgaaagatacaaacatgaaagagatatgattcttagctttgaggggttcgagggctggtgggaagacagatggacacactgagaattttgtgtgagctggtcaactctgtgattggcatatgagcatggagcatatgggcttggagaagtcacaaacagctttctggaggaggtgatgcctgggttcaatctggaagaagccatgcatgcatgcctccatccttccatttctttattcagcaaatatatttcaagtgctaactacatgtcaaacattgttttaagcattgaggtgagagtggtgaacgagacagtctctcctcttgtggaaattacatcctacttaggggagacagaaaacaaaaaagcaaataaatatataaacagctttagacagcaatacaaatgctaagaagaaagtgaggagtgagaagtaatggaggatgtgggacatggaactggaggaggctattttaagtaagactctctgagcagataacattgagtcaagacctgaatgatgggatggagatagccatgaaaagatctagtgtcagagccttctaggcagaggcaatggtaaaagccccatggtaagaactactttggtctattcacaaacaaaacaaagtttaaaacaccagctagaaaccagtgtagccagagagcaatgagagagggagggaatggcttgaggtgagggcgaaaaggaaagtctctttgccttatgatccatggtaaacagagtcccctgtgcatgggaagccactggagggtttaaagtgggagaggggcatgatctgattttaggctttaaaagaagtttgcagcaggaggttggcagcgcaagtccagaagaaggcaattccaggcagaggtagagtgtgtcccttccacatgcgtacttcctctggtcagggttgtcttcctgccgcctctcatgtctctccttcctgtcacagcatgcatgagggcatggtctgtgtacacaaccagggacctaagagatgccacttttgggcagtaatctgtggataatcccccctacttctagcaattctggcccaattgctagtcacctcatgtaacaccagtgagggctcatatccatttagtactcatacattctttttgcagcatttcttcatgattatttgattttacacaggaaggtaaaaacatcaggcaattttttaaatcatcatgtgacagataaagaagttgatgcacagagaggtgaatcagtatgctcaaggtcacacagctagttggtgacagttaggactagaatcctagtcccctgattcacagcctgtatttgtctacagtggttcacagtggaaatgctattgatatttggtggagtggctggtggcggtgagcagttctccattgtattagactgttctagacattgtagaacattttgaatccttggtccttgccagtaacctccaagcaagaagccttgtggcaacaaataaggcccccatacatttccatacatctcctagggaaggctggtgctactgtggtgggaaacagtggagtccaatcctctcttgttatagataaaaaggctgagtcaccagcagcagcagagacttagcaggtactttcatatttttaacaaatagtttctgattgcctagtatgtaagtattctgtgttatatgctgtgtattcagtgttgaagaaggacgtagtgcttgtcctcagggagtttacagcatggagagggtgagggtgaagcacaggatgctaatgaacaattacaaggcaatgagtggtcagtgtcatggtgggttcatacaggtagcataaggacataaagaagggcacctagtcccagtttggaggcacagggaaggaggaattttccaacatccatagctttccatggaatctaataagcttgcattaatgaagatgtttaaatatgatctggattatcggatggctgggaaaatgttcaaaagtacctaagggaggtcaaactcactgatgattagtgtcctttccagctctgcagcctggaatttctgttgtattcaagaagaccataaacagaatgtacttccatttgattcctataatttatgtggcaatgaggtgatcccatgttaaactggttgttagggcccgaatgtttgtgtccctccaaagtcatatgttgaaacctaatcatcaatgtgatagaattaatagatagggcctttgaggggctttgcccttaccagtgggacaagtgaccttataaaagaagccacagagagaagcctcactcctttcaccatgtgaaaacacagctagatgtcatctgtgaaccagaaagagggtccccaccagacaacaaccagacaccaaatctgtctgtaccctgatcttggactttcctccctctagaatggtgagaaataaatttttattgtttataagccaccttctttatggtattttgttatggcagtcccaataggctaagccactgggttataaagagaataaaatactaagaataatctgctttccctcaaagtgatttctttttttttattattattatactttaagttctagggtacatgtgcacaatatgcaggtttgttacataggtatacatgtgccatgttggtttgctgcacccattaactcgtcatttacattagatatctttcctaatgctatccctccccaatccccccaccccacgacaggcccccatgtgtgatgttccctgccctgtgtccaggtgttctcattgttcaattcccacctatgagtcagaacatgtggtgtttggttttctgtccttgcgatagtttgctcagaataatggtttacagcttcatccatgtccctgaaaaggacatgaactcatccttttttatggctgcatagtattccatgttgtatatgtgctacattttcttaatccagtctatcattgatggatatttgagttggttccaagtctttgctgttgtgaatagtgctgcaataagcatacgtgtgcatgtgtccttatagtagcatgatttataatcttttgggtatatacccagtattgggatcactgggtcaaatggtatttctgttctagatccttgaggaatcaccacactgtcttccacaatggctgaactagtttacactcccaccaacagtgtaaaagtgttcctatttctccacatcctctccagcacctgttgttttctgactttttaatgatcgccattctaactggtgtgagatggtatctcattgtggttttgatttgcatttctctgatgaccagtgatgatgagcattttttcatgtgtctgttggctacataaatgtcctcttttgagaagtgtcccttcacatcctttgcccactttttgatggggttgtttgatttttttcttgtaaatttgtttaagttctttgtagattctgaatattagccctttgtcagatgggtagattgcaaaaatcttctcccattctataggttgcctgttcactctgatggtagtttcttttgctgttcagaagctctttagtataattagatcccatttgtctatttgggcttttgttgccattgcttttggtgttttagtcatgaagtccttgcccatgcctatgtcctgaatggtaatgcccaggtttccttctagggctttcatggttttaggtatagcatttaagtctttaatccatcttgaattaatttttgtataaggtgtaaggaagggacccagtttcagctttctatatatggctagccagttatcccagttatccctatttattaaatagggaatcctttccccattgcttgtctttgtcaggtttgtcaaagatcagatggttatagatgtgtgatgttacttctgaggcctctgttctcttccatcagtctatatctctgttttggtaccactaccattcctcagcaaatgtaaaagaacagaaatcacaacaaactgcctctcagaccacagtgcaatcaaattagaactcaggactaagaaactcattcaaaacctcacaactacatggcaactgaacaacctgctcctaaatgactacagggtaaataacgaaatgaaggcagaaataaagatattctttgaaaccaatgagaacaaaggcacaatgtaccagaatttctgagacacatttaaagcagtgtgtagagggaaatttatagcactaaatgctcacagagaaagtaggaaagatctaaaatcgacatcctaatatcacaattaaaagaactagagaaacaagagcaaacaaattcaaaagcaagcagaaggcaggaaacaactaagagcagaactgaaggagacagagacaaaaaaaaccttcaaaaaatcattgaatccaggagctggatttttgaaaagattaacaaaattgatagaccactagcaagactaataaagaagaaaagagagaagaacgaaatagatgcaataaaacatgataaagggaatatcaccactgatcccccagaaatacaaactaccatcagagaatactataaacacctctatgcaaataaactagaaaatctagaagaaatggataaattctggacacatacaccctcccaagactaatccaggaagaagttgaatccctgaatagaccaataacaggctctgaaattgaggcaataattaatagcctaccaatgaaaaaaagtccaggaccagatggattcacagccgaattctaccagaggtacaaagaggagctggtaccattccttctgaaactattccaatcaatagaaaaaaagagaatcttccctaactcattttatgaggtatcatcctgataccaaagcctggcagagacacaacaaaaaagaattttagaccaatatccctgatgaacattgatgcaaaaatcctcaataaaatactggcgaaccaaatccatcagcacatcaaaaagtttatccaccaggatcaagtcagcttcatccttgggatgcaaggctggttcaacatatgcaaatcaataaatgtaatccatcacataaacagaaccaaagacaaaaaccacatgattatctcaatagatacagaaaaggcctttgacaaaattcaacagcccttcatgctaaaaactctcaataaactaggtcttgatggaacgtgtcttaaaataataagagctatttaagacaaacccacagccaatatcatactgaatgggcaaaaactggaagcattccctttgaaaactggcacaagacagggatgccctctctcacctctcctattcaacatagtgttggaagttctggccagggcagttaggcaagagaaagaaataaatggtattcaattaggaagagagaaagtcaaattatccctgttcgcagatgacatgattgcatctttagaaaaccccattgtctcagcccaaaatctccttaagctgataagcaacttcagcaaaatctcaggatacaaaatcaatgtgcaaaaatcacaagcattcctatacaccaacaacagacaaacagagagtcaaatcatgagtgaactcccattcacaattgctacaaagagaataaaatacctaggaatccaacttacaagggatgtgagggacctcttcaaggagaactacaaaccactgctcaacaaaataaaagaagatacaaacaaatggaagaacattccatgctcatggataggaagaaccaatatcgtgaaaatggccatactgcccaaggtgatttatagattcaataccatccccatcaagctaccattgactttcttcatagaattggaaaaaaactaccttaaagtccatatggaaccaaaaaagagcccgcattgccaagacaatcttaagcaaaaagaacaaacctggaggcatcgtgctacctgacttcaaactatactacaaggctacagtaatcaaagtgctttctaccaagtattgacccactaaacctgacctttattccatctgtccactcatacagagggttctgttaggactaagcaagccccagctctgggtgatgcgggtgggctttggggaggacagggcagggcaggacaggtcctctatggaggaatttctaattgggcactaagaattttttcttcctaggtagccagaagagctgaggagagccccttagctccaatttatgctgccttctgctgatccagggagactggcagtttaaatattagctggggacagttcactaacacctctgtgacagggaagagagtctcaagggacaagggtgcccaagaaccacaaacctcattctgccttccaggaagtgaagtgtcagctttcagcaaacgttccctctgcacaaggacagaaaatgccatctagagagctgctctaactgggttaaaagtcatgtttgtgtcacttgtgtcaaaaggacatggcttagaaaaaggactcaaccactagacagggagatgattgtggattgctgatggcttagatttaatcttcaaaggataaagctgtcagtgttagcttttcttgttgcttctgtatttcagattggaaaatttttactcaaaccagatatatgtcagctatctatgggataatttaaagagaaaaacaatggctattagattttttttttcaattctctcttctctgtccatcattcatgttctatttaccatctaaatgcttcctctaatttcaaacattcactccagtttggctttaacaaatcctttcatgagggctcaactttatcttaccatcaacttggttttgatggaggagaggcattgagataaatgggctatgctctttaagaatctagattaattcactttctgtgttcaatgttcagtttaggattccaaagatatcttgttgtggttaatcaaactctccactgacctctggctcagaatcatcaacacatttaggaaaaattcttgtttttgggaactcctcaattttcaggagtgtgtattttaagctccatcttccttctttctcatcctcacttcctgttctgcatggcttgggcttctgtttttatctcctttcttaagttttctccctttttcttcattgtttccttctttgttttccccaatttcactcaaaccccaccttcttttgactcaagaatttctctccagcaggatgctctccttaggatatagcttaagattccaaggctctccacatattcaaaccaaaagttattctagggtcttttccctaaataatattaagtaattatttaacctttgttagaaatacatggtcccttatagaaaatgtaacatgcaacccaaaaggtaaaaactacctatgatcctcctacctcaaaatgaacacttgacattttggtgtattttctttcaaatatgtagatgtatatattctaagcaaaacacttttttccttaattaaaaaatcataaaagaacattccaaattcccagaaatgcagaggtatgatgagtcactccatggagatctgggccaaaggcagctggcagaactcactccagatcctcaacaaacagagcttgtggttgtcattcagcattcacggagagttttgcttgatttttcacacccctcaactgtgcatcagcatcacctgggatgacagaaaaaaatacagatgtctggttcccacctgcagaagttttgtctcagttagtccaggatgaagccgtagcaccaacacttttgttttccaatacccctacataattctgaattatagctggagtagacaatgggtaccaagagtctgtgttgggctcttgcaccatggtgaaccatacctgaagatgccatataagttggaggctttgggagcttatgagttgcctctctgcttgatgtggaaaggtattgtggtggtgaggcgggcatgaaaacttagctttctaatggccaattggctggaagactctgaattgttttatgttgtcatttcattcctcctcacccttgtagggtccaagggaaagcctcttccttgactatggaaggtttgctgaacaatcaactcgcaaaaggcaggttaattggagaaagggcatacaaatttagaatgaatgaatacagaatgaagatccaatggtaaaggagaaactgttcatttttatgcttaggttcaacaaagtatggacagctatgtagagatatatttggacaaaaaggttatgatctgatgctagaggactgattggggaagcccagtgaggcctgtcagtctagattcctcttggcttctgtgtgtcattccttcctcctgggtatgaaggggtatgaaacagggccttccctggaattagggtcccatgacctagagtcaaacaagatgggtcacgtcatttctctatggccagtttttatacagaaaggcagaatgaaagttagagtaagatttttatgtttaatggctggctttggggacaaggggttctagtttctatgacctgctctagggacgagggattctagtttctttggctagccttgggggagaatgacactaacagacaagagggctggagaaggtcagagaaaaatttttgcttctgaggccttcattttggcctcagaaccccagggtgttttctgaaccccaacaccctcttcattttccattttccagcatattccaggtacatgaactgaactcccttcatggcctccctgtcccttcccaacaggtcccgcttcttcctttactcaagttctcctcactcccatgggcaatgactggaggattgcagattgttggctaatgcttacagtcttttgtcttcctgagaaactactggctatatagcgataaagaaatgtatacataacaagataaagatagtgaaatcttgattaatcagaagcttcaattttcagaaaaatattagctctattcaatttttaggagggagcagtaatcataggaaaataatttgagggtcaaagatttcattgacaacaaaaccaagcagtcaacagattcctggggtttctaaacctaggatccatggatagattatagggatattatgaaccctggaaattgaaggcaaaatggtgtgtttgtgtgtgtgtgtgtgtgtgtgtgtgtgtgtgtgtgcgcatgcatgtgcacatgtatttttctgtgaaaagggtcaggattttttccaaaggggtcctaattcaatacagtttaagaatcactatttgaaggtgtattttgctgtgtggtttctatactccagcattacttcttatccttccatcttccttgcctctcacatcaatctaatttgtgtcttgtctccattcaccccccaaacccacttccctaggccaggccctttccacctttcactttgaaactgaagatgtctctcgacacaaacaaatgaaaaacacatcccatgcttatggatgagtagaatcaatattgtgaaaatgaccatactgccaaaagcagtctacaaattctattcaattcccatcaaaataccaccatctttcttcacagaatgagagaaaaaactccaaaatttacaaggaaccaaaaaagagcccacatagctaaaccaagactaagcaaaaagaacaaatctggaggcatcacattacctgatttcaaagtatactataaggccatagtcaccaaaacaacatggtactggcataaaaatggcagataccccaatggaacagaatagagaatccagaaataaacccaaatacatacagccaactgatcttcaacaaagcaaacaaaaacataaagtgggaaaagggcaccctattcaacaaatggtgctgggataattggcaagccatatgcaggagaatgaaactggatcctcatctctcactttatgccaaaatcaaatcaagatggatcaaatagttcaatctaagacctgaaactataaaaatactagaaggtaacatcggaaaaacccttctagacattggcttaggcaaagatttcatggccaagctcccaaaagcaaatgcaacaaaaacaaagacaaataggtgggactaaattaaactaaagagctttgcacagcaaaaggaactcagcagagtcaacagacaacccacagagtggaagaaaatcttcataatctatacatctgacaaagtactaatatccagagtctttaaggaacttaaacaaattagcaagaaaaaaacaatcccatcaaaaagtgggctaaggacatgaatagacaattctcaaaagaagatatacaagtggccaacaaatgtatgaaaaaatgctcaacatcactaatgatcagggaaatgcaaatcaaaaccgtgatgtgataccaccttactcccacaaaaatggccagaatcaaaagatagaataataatagatgttggtgtggatgcagtgaacacagaacactcctacattgctggtgggaatgtaaactagtaaaaccactatggaaaacagtgtggagattccttaactaaaagtaaaactaacatttgattcaacaattccaccactgggtacctacccagagggaatgatgtcgttatatgaaaaaggtacttggacatatatttatagcagcacaatttgcaattgcaaaaatatggaaccagcccaaattcccatcagtcaataagtgggtaaagaaactgtagtatatatatatatatatatatatatatatatatatgtatgatggaatactattcagccataaaaaggaatgaattaatggcattcacaacaacctggatgggattggagactattatgctaagtgaagtaactcacgaatggaaaaccaagcattgtatgttctcatttatagatgggagctaagctatgaggatgtaaaggcataagaatgatacaatggactttggggactcagggggaatggctgggaaaggggtgagggataaaaggctacaaatttggttcagtgtatactgctcaggtgatgggtgcactgaaatctcagaaagcaccactaaagaactaactcatgtaaccaaataccacctgttcccccaaaacctacgattggacaaaaagaacattaaaaaagaaagaaagagaaaaagaaagaaggaaggaaggaaagaaggaaagaaagaaaaagaaagaaagaaagaagaaagacagaaagaaagagggaaagaaagaaagggggagggagagaggaaaaagggaaggaagggaaagggaaggaaagaaagaaagaagaaggaaagaaagaaggaaggaaggaaagaaggaaagaaagaaaaagaaagaaagaagaaagacagaaagaaagagggaaagaaagggggagggagggagggaaaagggaaggaagggaaagggaaggaaagaaagaaagaagaaggaaagaaagaaagaaaaaagaaagagaaagaaaggaaggaaggaagggagaaggagagagggagggaggggaaaaaggaaggaagaaaggaaggaaagggaagagaaagaaagaaagaagaaagaaagagaaagaaaaaaagttgcagaagtctctgatctagattactctccctgctttctgccttcctttctttgctccttcctttaccaaacatctctcccccatctaattcatttcatggctacaagatactcttttaaacccagatctgatcaaagccatgctccaacttaaaatgtgtcctcaaagtgcctacaggaaagcaattatgcctattgtcaggtaacttaagtccttttacactctggtcccagctagctttctaccactctacatccccacctctgcaccttgacatcttctatgccctccacctgaaatgatctttcctttccttctcttattatactctaaacattaattggcatctctactattgaccctgccataattccaccagttcccaccctgaactcccaagaattttgcctgtgctggaatactccaaatatactgtgggtttggttccagaccaccacaataaagtgaatattgcaataaaatgagacacacttcttttttttgtttctcaatatatataaaagttatggagattccattccaagatggccaaataggaacagctctggtccacagctcccagcatgatcaatgcagaagatggtgatttctgcatttccaactgaggtaactggttcatctcattgggcctggttggacagtgggtgcagcccacggagggtgaattgaagcagggtggggaatcgcctcacccaggaagtacaaggggttgggggatttccctttcctagccaagaaaagccatgacagactgtacctggaaaattgggacactcctgtccaaatactgagcttttccaatggtcttagcaaatggcacaccaggagattatatcctgcgcctggctcagtgggtcccacacccatggagcctttctcactgctagtgcagcagtctgagatcaacctgcaaggcaacagcctggcagggggaggggcgtctaccattgctgaggcttgagtaggtaaacaaagtggccagggaagctcgaactggatggagcccacacagctctgcaaggcctgctgcctctgtagaccccacctgtgggggcagggcatagatgaacaaaaaggcagcagaaacctctgcagacttaaatgtccctgtctgacagctctgaagagagcagtggttctccgagcatggtgtttgagctctgagaatggacagactgcctcctcaaatggatttctgacccctatgtagcctaactgggagacatctcccagtaggggctgacttacacctcatacaggcgggtgcccctctgggacgaagcttccagaggaaggaacaggcagcaatatttgctgttctgcaatatttgctgtcctgcagcctctgctggtgatacccaggcaaacagggtctggagtggacctccagcaaattccaacagacctgcagttgagggacctcactcttagaaggaaaactaacaaacagaaaggaatagcatcaacatcaacaaaaaggacatccacaccaaaaccccagctgtaggtcatcagcatcaaagaccaaagttagataaaaccacaaagatggggagaaaccagagcacaaaagctgaaaattctaaaaaccgaggacttcttctcctccaaaggattgcagctcctcaccagcaatgaaacaaagctggacagagaatgactttgatgagttgacagaagtaggcttcagagggtcagtaataacaaactgctcctagctaaaggaggatgttcgaacccatcgcaaggaagctaaaaaccttgaaaaaagataggacaaatggctaactagaataaacagtgtagagaagaccttaaatgacctgagggagctgaaaaacatgacatgagaactacgtgatgcatgcacaagcttcaatagctaattcaaacaagtggaagaaagggcaccagtgattgaagatcaaattaatgaaataaagtgagaagagaagtttagagaaaaaagagtaaaaagaaacaaacaaagcctccaagaaatatgggactatgtgaaaagaccgaatatacgtttgattggtgtacctgaaagtgacagggagaatggaaccaagttggaaaacactcttcaggatattatccaggagaacttccccaacctagcaaggcaggccaacattcaaattcaggaagtacagagaacaccacaaagatactcctttgtgtgtatctatgaagggcaaccccaagacacataattgtcagattcaccaaggttgaaatgcaggggaaaatgttaagggcagccagagagaaaggtcgggttacccagaaaggaaagcccatcagactaacagcagatctcttggcagcaactctacaagccagatgagagtgggggccaacattcaacattcttaaagaaaagaattttcaacccagaatttcatatccagccaaacaaagcttcataagtgaaggagaaataaaatcctttacagacaagcaaaggctgagacattttgtcaccaccaggcctgccttacaagaactccctaaggaagaagtaaacatggaaaggaacaaccagtaccagccactgcaaaaacatgccaaattgtaaagaccatcgatggctaagaagaaactgcatcaactaatgggcaaaataaccaactaacatcataatgacaggatcacattcacacatatcagtattaaccttaaatgtaaatgggctaaatgccccaattaaaagacacagactggcaaatttgataaagagacaagatccatcagtgtgctatattcaggagacccatctcacgtgcagagacacacacaggctcaaaataaaaggatggaggaagatctaccaagcaaatggaaagcaaaaaaaacaggggttgcaatcctagtctctgataaaacagactttaaaccaacaaagatcaaaaagacaaagaaggccattacataatggtacagggatcaatgcaacaagaagagctaactatcctaaatatatatgcacccaatacaggaccacccagattcataaaggaagtccttaggacctacaaaaagacttagactccaacacagtaataatgggagcctttaacaccccactgtcaatattagacagaccaacgagacagaaggttaataaggatatccaggacttgaactcagctctgcaccaagcagacctaatagacatctacagaactctccatcccaaatcaacagaatatacattcttcccagcaccacatcacacttattccaaaattgaccacatagttggaagtaaagcactcctcagcaaatataaaataacagaaatcacaacaaactgtctctcagaccacagtgcaatcaaattataattcaggactaagaaattcactgaaaaccgcacaactacatggaaactgaacaacctgctcctgaatgattactggataaataacgaaatgaaggcaaaaataaagatgttctttgaaaccaatgagaacaaagacacaacatacgagaatctctgggacacatttaaagcagtgtgtagaaggaaatttatagcactaaatgcccacaggagaaagcaggaaagatctaaaatcgacatcctaacatcacagttaaaagaactagagaaacaagagcaaacaaattcaaaagctagcagaaggcaagaaacaactaagatcagagaagaactgaaggagatagagacattaaaaaaaccttcaaaaaatcaatgaatccaggagctggttttttgaaaggattaacaaaattgatagaccactagcaagactaatagagaagaaaagagagaagaatgaaatagatgcaataaaaaatgataaaggggatatctttgccaatcccacagaaatacaaactaccatcagagaatactataaacacctctatgcaaataaactagaaaatctagaagaaatggataaattctggacacatacaccctcccaagactaacccaggaagaagttgaatccctgaatagaccaataacaggctctgaaattgaggcaataattaatagcccaccaatgaaaatagtccaggaccagacagattcatagctgaattctaccagaggtacaagaaggagctggtacgactccttctgaaactatttcaattaatagaaaaagagggaatcctccctaactcattttatgaggccagcctcatcctgataccaaagcctggcagagacacaacaaaaaaagagaattttagaccaacatccctgatgaacatcgatgcaaaaatcctcaataaaatactggcaaaccaaatccagcagcacatcaaaaagtttatccaccaggatcaagtcagcttcatccttgggatgcaagggtggttcaacatacacaaatcaataaacgtaatccatcacataaacagaaccaaagacaaaaaccacatgattatctcaatagatacagaaaaggcctttgacaaaattcaacagcccttcatgctaaaaactctcaataaactaggtgttgatggaatgtatctcaaaataataagagctatttaagacaaacccacagccaatatcatactgaatgggcaaaaactggaagcattccctttgaaaactggcacaagacagggatgccctctctcacctctcctattcaacatagtattgcaaggtctggccagggcagttaggcaagagaaagaaataaatggcattcaattaggaaaagaggaagtcaaattgtccctgtttgcagatgacatgattgtatattcagaaaaccctattgtctcagcccaaaatctccttaagctgataagcaacttcagcaaagtctcaggatacaaaatcaatgtgcaaaaatcacaagcattcctatacactaatagcagacaaacagagagtgaaatcatgagtgaactcccattcacaattgctacaaagagaataaaatacctaggaatccaacttacaagggatgtgaaggacctcttcaaggagaactacaaaccactgctcagtgaaataaaagaggacacaaacaaatagaagaacattccatgctcatggataggaagaatcaatatcgtgaaaatggccatactgcccaaggcaatttatagattcaatgccatccccatcaagctaccattgactttcttcacagaactggaaaaactactttaaagttcatatgcaaccaaaaaagagcccacattgccgaaacaatcctaagcaaaaagaacaaagctggaggcatcttgctacctgatttcaaactatactacaaggctacagtaaccaaaacagcatggcactggtaccaaaacagatatattgaccaatggaacagaacagaggcctcagaaataatgccacatatctacaaccatctgatctttgacaaacctgacaaaaacaagcaatggggaaaggattccctatttaataaatggtcctgggaaaactggctagccatatgtagaaagctgaaactggatcccttccttacaccttatacaaaaattaattcaagatggattaaagacttaaatgttagtcctaaaaaccctagaagaaaacctaggcaataccattcaggacacaggtacaggcaaggacttaatgactaaaacaccaaaagcaatggcaacaaaaacccaaatagacaaatggggtctaattaaactaaagagcttctacacagcaaaaagagtgaacaggcaacctacagaatgggagaagacttttgcaatctacccatctgatgaagggctaatatacagaatcaacaaaggactttaacaaatttataagaaaaaaacaacctcatcaaaaagtgggcaaaggatatgaagagacacttctcaaaagaagacatttatgcaaccaacggacacatgaaaaaatgctcatcatcactggtcatcagaaaaatgcaaatcaaaaccacaataagataccatcttataccagttagaataccatctcacaccagttagaatcattaaaaagtcaggaaacaacagatgctggagaagatgtggagaaataggaacacttttacactgttggtgggagtgtaaactagttcaaccattgtggaagacagtgtggtgattcctcaaggatctagagctagaaataccatttgacccagcgatctcattactgggtatacacccaaaggattataaatcatgctattataaagacacatgcacacgtatgtttattgtggcactattcacaatagcaaaaacttggatccaacccaagtgtccatcaatgatagactggattaagaaaatgtggtccatatacaccatggaatactatacagccataaaaaaagatgagttcatgtcctttgcagagacatggatgaagctggaaaccatcattctgagcaaactattgcagacagaaaaccaaacataggtgggaattgaacagtgagaacacttggacacagggcagggaacatcacacatgggggcctgtcatggggtgggggccagggggagggatagcattaggagaaatacctaatgtaatgtaaatgacaagttaatgggtgcagcaaaccaacatggcacatgtatacctatgtaacaaacctgcatattgtgcacatgtaccctagaacttaaagcataataaaaaaagttatgtttacactctattgtagtctattaaatgtgcaattgcattatgtctaaaaaatgtacatgccttaatttaaaaatatcatattgctaaaaagtactaacacagaaacatgaagtgagcacatgttctcagaaaaatggcacggatagacttgattgacacagggttgccacaaatctcaatttgtaaaaatgcaatatctgtgaagcgcaataaagcaaagcccaataaaatgaggtatatctgcgacttgtctttttatgcaagtaaaaatcatttctgtacatgtttccatttcccttgaggacaatgcacacatgatttatctctgtatcctctacaggtactaatataacattttggcatgtaattagtgctctataaatgtttgtttaatattaccgtctgtattagtcagcttgtgttacaaaataccaaaacctgggtgatttatacaacagaaattaagttctcacagttctggagtctggaagtccaagatcaaggtgccagaaaatttggtttatggtgaggtctcacttcctggtttgtaagaagactgccttctcaggatgtcctcatgacctctttgcctcttctcatgacctcttttccatgtgcacagacagagagcacgcactctggttttgtctcctcttcttatgaggtcacccgacctggtacattagggccccacccttatgacctcatttaaactcgattacctttgtaaaaaccctgtctctaaaccccgtctctactaaaaataaaaaaaattagccggacatggtggcgggtgcctgtagtcccagcttctcgggaggctgaggcaggagaatggagtgaacccaggaggcagaggttgcagtgagccgagattgcaccactgcactccatcctgggcgacagagtgagactccgtctccagttaaaaaaaaaaaaaaaaaaaaaaaagcctgtttctaaatacagttacattgggggttagagcttcaacatatgaattttaggggcacacagttaagtccataacaccctctttgttctctatctgtatctatctaaagtacaaatagacagcctctgatgtgcttgataaggatctagagtcttggttggtttctcagtcaacaaataagaagctagttgtatttaatgtcctttatttactaagaggaaaagagacaccacttgacactttagcatgttgttttccaaactctagtcatctgtacatcaccatcatgatttttgtcatctcatcatgccaaatgtaccactgtttacatagaatcactcttcacattggttcatgtttttacttcagcattttagaaaatactatatgtgaaatcataggtttgattacatttccataatatacattaaaacaaatatattataattaaagtaatttgttcagaatgtttgctactctaccccactgagccctaccactgtaccgggatggtctcatttccatctctgttgatgtcaggctcagtcacttgactggctttgtccagtgatgtttgctgctcctaagcagaagatttaagtggcatttcctggactggtcacaattctttcccagcctcaagactgtactttagcctagtactgaaaagaagaaaatatgaaacaaagctgaaacccactggcaacctacaggtttgggagtgggagataaatgttttttattgtaagccactgagattttcttataggtcattcgttactgcagcctaacttaacctatgctgactaatcaattgctcattctatattacctaaagtcatcttatataataacactttgagaaatactcctaaagtgtcttctgcggacttgaattggggaacaactgtaaagtattgatgcatttttcaaatgactcattgctttcatcttattgagaaattatttaaatggaatgtttttaaacctgtgaatgttccacatccttacaaatcatggcctatagatttgctgttccactgggtccctgctcttgtagcatccatagctcatgatggcaattctttcacagaaagggggaaaccattgcactttaaaaatagcctttagtctcaagaagtggtgatggagacttggcactcagatgaccaaaaaggcactgcttgtctcaaatcctccagtttctcccacagatacttcaaagactttaaaggaagctggactttgggaagtgccaggcccttgaagttgggcacagagcatgtgggaatgcttttcagggctaagacaggtggatgatttttaacataagaggactgaggattaaaaaaaaaaaaaacacacagagtgtaaaattattctttatctgtttgcccattatctaatccatgtaatcttctacaaaatacatgttttctgctatgatcagggaatggcaatgaagtgattcatgaatattcaggttttaaagagttgtcatacctgctacgtaagaataacacaattttaaagaaccacattgtcattaaaataatatataaatagaagacataattaaaccattatttaattcgaaacatacttcttaaagctgctgtgggcctctgtggagaacaacaaccatcttttgacttctgttcccctccattcttctccattctgctgccctagatagtaattatctcctttttgccaaataagaagtctttcttagttctctttctctttaactccttggctacatttaacaattaacctccatcttgaatttcactctaatccagtgttctatgaaagtccactttcccaattcttctttgaactcctagaaaatttttttttcactttctcagctcattttcttcctcttatgtaagtgagcctgctccttcaatatcctttgacctctgtttttgtcctgttaccctctttgctttaataaacttacccatcactacagtatcattttgaggctgtcatctccatccctggcaaatattttgctcccaggatttgtaatttccaccaactcagaggtcatatctacttggatgtcctactatcatttcaaactcaacatggacaaaaccacgctatcttctgaccaatacaatctacctttttactgctcaccacattcccattctcctaggaatcatcatttattcatccctcttttttaggacctcaattcaatctatcttcaagtaagttatttttatctttaaagtattctttggatctttttgttttcttctaatttctactttgaatatccttgtccagactacatagcaccctgcaacagcatcatgccatgatgtatgaaagatgctcagtgaggcagatgcctctggttgcctattaagtatctagtctcccctccttttttattacaatagctccagtaacgtgggggagggagtcaatagcaacacacccaagtaaaaatatctttcctgttatccctgcatctaggggtggatgacttagttctgccgatgagcaactctactacacaagaattctgggagagctatggttttcccgataaaagggaaaacccagctggtgcgtgcctttgtctttctcctttccttctctgccccccaccgtggaatgtagatgcaatgtctgtggttaaaacgccatagtttaaatcagacaagcttaagttttaaaccctacctcagatcctttttgtgtggagaccatggaaaacttacctatcctctttaagcctcactttcttatctgtaaaatgggtacaacaatatcactaggttgttgggaagattaaaagtattaatatgtttataaaacgttgagaatgatgatgcatatgaccttgccattaccagtaaatggtggatatgattctggctgtttccattctctgaactcctgttgtgcttagaataattatgatacatattttcactgccacatttcgtctcctagattacctgcctccttggagacaaggagactagaaccaccttgaggccattgactatcttatctgcttgttttatagccttcgaattgccttgttcagttctaggtgtgtagtgggctctttaaaacagtaatttattgacagattatctgataagtacacgaaaatcaggtctcaggacaaattaagtatttgtagaagttaagataccaaggggaaatgctataagaattatgattttgcactgaaaacttatctaaccatcttcagagaaaaacctggatgtaaacagtgagcctgctgtggaaggtttctaccctgcaccaggcctcatactgagtcctaattcagcctctcttcccaacccctcacatgctcattcaactccaaagcactggggagcagtgcagatttccctgggaaaagaacttcctaaacatctcctttaacatctcagtctttctcctcttgtctcttcctggttgctttccttcttttcagctttctcccctgaaaaaagacttgggaaaatccccatatgaagacccttgtttgcaacacttaggttccctcctgagcttgtacaccctccctggccaccagcaaacccaaagtcctagtggtaagcagggattgcatggcacatccccgggagacagcatacttcttaggatctccctctggggagggtgatttgtagatttattgcagcttgatgtggcttcattcctatgcaccagggcagtttttcacttcctttacatcacctccagccctactctgctacttccctccattctctacttctctcacctccacactgcagccttctgtttctgtcatctctctttgtcctaatcatcaacctccatcctttttgtttccagaaggcctgcggctagtgactgaggcgggggtgcaccacgtcttcaaccaagggcagcacagaagaagtagagtccctctcagctggagggtctgatgatgcttctctcctcatcaaagctggaggcaggaggcagcttcctgtccatgactctcaccgccttgtcttggtcatggcaagtttttatttgctccccaaatagaccagggttctatgaataggcacacccagttatgaatggagagaagctttaaatcaggatattctaacacctttattactcacggtcggtagggaccagaaatatggagattaaagtgtccatcatgtcactagaatcccttgggtataggatcttactgcgtggccttatctttcttttatcaaaacatacacacacaaaagacatttacctgccacatgcacccccaggatttgaaaatggagcacaataaaaataagctgacagtgggagaaagtggcatattcattttctctgtcattacctttgattatgaaaaagccctgagcaggtgtcaggtttttccgcagctctctcaggaagatctgggctccaggtatttcccacgtgagttcatgggatgcgggaagatgtaggcactgaaggccgctgacatcctattatgactgagcagcaaatctgccaggaaataaacattctaatgtagatttctaggatttgctccaattttctcatgaaaagaaagccatctctgacaatttacagatcatttagcttctccacatgatgtgtttgattctcttttctcccctttcctcttcttacttgagtctgccaccaccggctattgccctggttgtgtttgttactgtgtgtgtgagtgtgcatgtctcggcatgtatgtaaccttgaacttgtacattaacatgcttatgattctctgggatcatttttattttcaaatatggagactgcctcgtccctcccctccctcccctcttctcctcttcctaccaagctgctcttctgtgcctctgttgtaactgggtcatgtttttgactctagcaagaggaaacaaggggccttcagtgggaaagcaagaggtttccagtgctcaccaaatacagatgctcaggaaatgggggactcatgtggcttacatatagggaacttcacagctaaaataccatgtcctgtgtaggaggcccagatcacttctcggcgtgtcccagcctgcctgcctccaaatgtcctctggaataattcaacttcttatctaaggtacgagccagcttccttgaactgccaactgctcgattgcacaacaaatcggttatataagaggatcttaagaaagaataaaatcatgagcaccccataattgcctctctccagtcttcagccctagacccaaggaagagggcccagtaggggcagttggtcgatttgtaaacagaaactgcagagtggaccgttggctttgtcgaatgatgttcaaaagctgcacgttgtctttaatgtttccttggacttcccccacccccactccacctcatcaccccaaatgcaggccctaattatcctggatgaaaatagaaggctcctcatcatttatttatttttagcacttgctcaaactaattggtagacctgcaacccatacataatacagtgatctggaagaaactgacagctacttaatgacaaattctattgtacgaggacagagaacgtgaggcttaatctgcagtagggtctcgtttctgatacattttgtctttaagggttattaccagaaagtactcagccaaagctcagggaggccagcccagccctctccctgcttctcctggctttcagtggtgggttggctggatctgagcctttgagggaatgaggcctggtatttaagagggccatgtcctggaaaggccatgtcttgatcactaaataaagaaggtcatgaagaatctgggaagagcaggaattctggaggcagacaaacctagggaaactcaaagcttgaacattcatcatctatgtgactttggagaagttgcttaacctttcagaccctcagtttcctcatgtctcaaaatggggagcataagatctgcccttcagagtgctttggaggattaatgtggaaacaccaattatgctgcataatacaagcttagatatcgataaaaacttctttcactctatgaatttacagcatccacaagatctcttacatctacagctatatttcttagacctatttgctctagggagctatgaacaccaagatttgcacttccattttattttttattgggaatataatataaacaagatatcaagctaccatgcaagacatcaccaagaagattctggaattctatgactgattccacttgaccatgtgctcaagcgctgtgaaatcaagaaggcctacttttgaatcctggactaaatgtgtaatctttggtaaattatttaatctttctaagccttaattttctctttttatttttaggaattttgtgaatattaaaaagaataacgagtataaagtatctaattaagtgcttgaaatagattaggtacccttaaaatattactttcttctctccattgattaatctttcatattaattttctactgttttgaactgaaatatatattcagtcaagtaacaaatgtttgttgagcatctactgtgtggcagagactgttctagatgttagagacctaatattctggctgagggggaaagaagataagctgacaaacacaaatttatatagttttgttttaaaaacatatttatatagttttgtttaaaaaagagcccagaggaagagctgactttgtagactgcgctaacctgttagagattttttcagacaggcttgcctatgtgagtatgctatctagatcaaacataaatgctacatagtgcttacattattaagccttctaggtaagtgtcatgtagcagtagccccttgattttatttgaaaacaatctgaatatcagacctgtaaattatttaatggacctccttccatgaggtttatgttacatgttactttcttcactcaactatatttcatttcatggaggaacacttacataagcatatagagagctttttcgtctgtttatatagctgcttataattccaaaatatgtgcacacacacacacacacacacaccattatttagccatccccttattgatgggaattttctacctgttcggggggaggaaaattagaaaattgatatccttgttcctatattattatgctcatatgataatttgtgtaggatatattctttttatattttgaattttcaaaatgtcaatcacatgaacccaaaatagtatcaactgtcatggttttcacagataatttctctttttcaattgcattcatctttcttgactatttgccaatagttcatcaattacattagttttctggaaactcttggacaaggttttgttaggtgcgcctttctgctttcccatggatttcctctgggtgggctgcagagcactggctgagtgtgggatgcagggtgaagcagattgggggtacaagcttctgggctgcttcttgctaagcatgatcatggacacatttcttcacctctccaggtcttacttctttgtctacaatctgaggataattccctcccacctttattcactaatgcatgttattcttttggccattcacctgggacatcaatctccaattcctagaagtatccaggagagttggtgcagaagactctccctctttagtgtcctccacagtaacttctgttccctcacatagctgccttctgaggaaatttactcctttaattttaaaaaataggctttattttttagagcagttttaggttcacagcaaaattgagcagaaaatacagagagttctcatatgcccccagtacagagcctgtaccactgataatatccctgtatcagagtggcacctttgttacaatcgatgaactacattggcacaccattatcacccaaagcccatagttccatcgtttatatcagggttcacctttgttgttgcacagtctatggatggcatgtgtctaccattatagtatcatacagaatatagtttcggtgcactaaaaatccgcggtgttccacctattcatttcttcttcccctctaactcctggcaatcagatttttaaaatgtcttcctagttttgccttttccagaatgttctatagttaggatggtatagtacacaatctttttttttttttttttgaggtggagtctcgctctgtcacccaggctggagtgcagtggtgcgatctcagctcactgcaagctctgcctcccgggttcacgccattatcctgcctcagcctcctgagtagctgggactacaggcgcccgccaccacacccggctaattttttgtatttttagtagagatggggtttcactgtgttagccaggatggttcgatctcctgacctcgtgatctgcctgcctcggcctcccaaagtgctgggattacaggcgtgagccactgcgcccagcccagtatgtaaccttttaagattgatgtattttatttaataacatgcatttgggattctcccatgtcttttcagggctcaatagctcatttctttttagtgctgaataatattccattgtatggatacaccacagttttttatccatatacccactgaaggacatcttggttgctttcaatttttggaaaatataaataaagctgcaatagccatctgcgtgcaagtttttgtgtagagataagtttcagattaatttgggtaaacaccaagaagctcaattagtggattgcatgataaaaaatgtttagttttgtaagaaactcccatcaactgtcttccaaagtggctgcactcttttgcattctcatcggcaattaatgagagattctgttgctccctatctttgaaagcatttggtattgtcagtgttttggatttttggtaattctaatgggtgtgtagtggtatctcattgttttagtctgtaatttcctgatgacatgtgatgtggagcatgactcttaattttcttacttcattttattgatttttggtttggcttagtagtgtctttattgcaaaaaataatacttgcctcatgggattattatgagaaataaggaaagaatctgataatttcaaatacagaggtgaatttatagacttcatttctatatcttgctcaagtttgataaggctagagctagaagccacattggtagaaagttagtgcccagcaatggtgtttaagttgcataggacagtggatttcaaatattttggtctcaagatccttttacagtcttaaaaattacttaggaccccaaagagctgttgtttatgagaaataaatccctttatatttaccatataagaaattaaaaattagaaaaattatatgtattaatttattaataacaataataaacccattacatgttgctataaataacattgtatgagaaaatgtctatattttaaaaacaaaaaaattaatgagaagaatggcattgtgtgactttttttggaaatctttttaatgtccagctcaagacttccagattctcagatctgcttatgcattcaatcagttgctgtatgtttttttgtttcaagcacataaagaaaatttggctgtacataaatatgtagctggaaaaaagatatgtagctccatgaacagctgggaaggatctgcagaactatgaggagttcttgtgtcatgctttgagaaccactgacgtaagtgcatggtatctggtccacacttttacatattctcagtttggccatcaagtccccacagttatgactttgcagcaaagatcttgataaaacaaaaaactggaccctaatgtaagaaatgatgtactgagattctctgagggtttgaagcctaaagagtattacccacaagacccacttaccactttatattatgcccaaaataacgaacagtgctgaataagagcacaggctctggagacaaaagaattgggctctattccaagtcctaccatgtaaaaattgtgtgtattgagaaatggcttaatctatctacaccttaatttcttcatctgtaaaatactcaatttcatagggttctcatgaagattaatgagataatgcatttgaagtttttcatatagagttgacattaaatgcttcacaaatgttagttcttagatcaacagcactcgatttctcactaagatcaacattctatgagctttaatacaagccaacagcaagacctttctttaaaaagacactaagagtggctggcaggatggccaaatatgaacagctccagtctgcagctcccagtgagatcaacacagaaggcaggtgatttctgcatttctaactgagataccaagctcatctcattggaactggctagacagtgagtgaagcccatggaaggtgagcagaagcagggtggggagttgcctcaacctggaagtgcaagggcttggggaactccctcccctagccaagggaagccatgagggactgtactgtgaggaacagtgcattccagcccagatactatgcttttcccatggtcttcaaaacctgcagaccaggagattcccttgggtgcctacaccaccagggccctgggtttcaagcacaaaactgtgaagccatttgggcagacaccgagctagctgcaggagttttttctttcataccccagtggcacgtggaatgccagtgagacagaactgttcactcccctggaaagggggtactgaagccagggggccaagtggtctagctcagcagatcccacctccatagagctcagcaagctaagatccactggcttgaaattctcactgccagtacagcagtctaagttgacctgggatgctctaacttggttgggggaggggcgtccacaattaccaaagcttgagtaggcggttttcccctcacagtgtaaacaaagacgccaggaagtttgaactgggcagagcccactgcagcttgggaaagccactatagccagattccctctctagattcttcctctctgggcaaggcatctgtgaaagaaaggcagaagccccagtcagggacttatagataaaactaccatctcccttggatagagcaccaagaggaagggagagctgtgggcacagcttcagcagacttaaacgttcctacttgccagctctgaagagagcagtggatctcccagcacagcgtttgagatctgctaagggacacactgcctcctcaagtaagtccctgacctctgtgcttcttgactgagagacaactcccagcagggatcaacagacacctcatgcaggagagctctggctggcatctggtgggtgcccctctgggatgaagcttccagaggaaggaacaggcagcaatctttgctgttctgaagcctccgctggagatacccaggcaaacacggtctggagtggacctccagcaaacttcaggagacctgcagcagagaggcctgactgttagaaggaaaactaacaaacagaaaggaatagcatcaacatctacaaaaaggacgtccacacaaaaaccccatccaaaggtcaccaacatcaaagaccaaaggtagataaatccaagaagatgaggaaaaaccagtgcaaaaaggcagagaattccaaaaaccagaatgccttttctcctcaaaaggatcacaactgcttgccagcaagggaacaaaactggacagagaatgagtttgatgaattgacagaagtaggcttcagaaggtgggtaataacaaactcctccaagttaaaggagcatgttctaacccaatgcaaggaagctaagaaccttgaaaaaaggttagaggaattgctaactagaataaccagtttagagaagaacacaaatcacctgatggagctgaaaaacacagcaagacattttcatgaagcatacacaagtatcaatagccaaattgatcaagcagaagaaaggatatcagaggttgaagatcaacttaatgaaataaagcttgaagacaagattggagaaaaaagaatgaaaaggaatgaacaaagcctcaagaaatatggtactatgtgaaaagaccaaacatacatttgattggtgtacctgaaagtgatggggagaatcgaaccaagttggaaaacactcttcaggacattacccaggagaaattccccaacctagtaagacaggccagcattcaaattcaggaaatacagagaacatcacaaagatactcctcgagaagagcaaccccaagacacataattgtcagattctccaaggttgaaacaaaggaaaaaaagttaagggcagccagagagaaaggtcaggttacccacaaagggagctcattagactaacagcagaactctctgcagaacctctataacccagaagagagtgaagaccaatattcaacattcttaaagaaaagaattttcaacccagtgtttcatattcagccaaactaagcttcataagcaagtgggggccaatatccaacattgttaaagaaaagaattttcaacccagtatttcatatcgagccaaactaagctttataagtgaaggagaaataaaatcctttacagacaagcaaatgctgagagatttcatcaccaccaggcctgccttacaagagctcctgaaggaagcaccaaatatggaaaggaaacaccagtaccagccactgcaaaaatatacaaaattgtaaagatcattgacatgatgaagaaattgcatcaagtaatgggcaaagcatcatagttggctagcatcataatgacaggatcaaattcacacataacaatattaaccttaaaggtaaacaggttaaatggcacaattaaaaggcacagactggcaattggataaagagtcaagatccatcagtgtgctgtattcaggagacccatctcacatgcaaagacacatataggctcaaaatgagtggatggaggaatatttaccaagcaaatggaaagcaaaaaaagcaggggttgcaatcctagtctctgataaaacagactttaaaccaacaaagataaaaaagacaaagaaggccattacataatggtaaagggatcaatgcaacaagaagagctaactatcctaaatatatatgcacccaatataggcacatccagattcataaagtaagttcttacagacctacaaagagacttagattcccacacaataataatgggagactttaacaccccactgtcaatattagacagatcaatgagacagaaaattaacaaggatattcaggacttgaactcagctctggaccaagtggacctaatagacatctacagaactctccaccccaaatcaacagaatatacgttcttctcagcaccacatcacacttattctaaaattgaccacataattggaagtaaaacacccctcagcaaattcaaaagaacagaaatcataacagcctctcagaccacagtacaatcaaattagaactcaggattaagaaactctctcaaaaccacacaactacatggaaactgaacaacctgctcctgaatgactgctgggtaaataacgaaattaaggcagaaataaataagttctttgaaaccaatgagaacaaagacacaacataccagaatctctgggacacagcgtttaaagggaaatttctagtgctaaatgttcataggagaaagtgggaaagatctaaaattgacacaccctaacattacaattaaaagaactagagaagcaagagcaaacaaattcaaaagctagctgaagacaagaaataactaagatcagagcagaactgaaggagatggagacacaaaaagcccttcaaaaaatcaatgaatctaggagctgggtttttgaaaagatcaacaaaattgatagaccactatccattctaataaagaagaaaagagagaagaatcaaatagacacaataaaaaatgataaaggggatatcaccactgatcccacagaaatacaaactaccatcagatagtactataaacacctcttcgcaaataaactaggaaatctagaaaaaatggataaattcctggacacatacaccttcccaagactaaaccaggaaaatgttgaatcccataacaagctctgaaattgaggcagtaattaatagcctaccaatgaaaaaaaaagcccgggatgagacggattcacagccgaattctaccagaactacaaagagcagctggtacgattccttctgaaaatattccaaacaatagataaagagagactgctacctaactcattttatgaggccagcatcatcctgataccaaaacctggcagggacacaacagaaaaagtagatttcaggccaatatccctgatgagcgttgatgcaaaaatcctcaataaaatactggcaaaccaaatccagcagcacatcaaaaagcttatccaccaagatcaagtcggcttcatccctgggatgcaaggctgggtcaacaaacacataccaataaacgttattcatcacataaacagaaccaaagacaaaaaccacatgattatctcaatagatggagaaaagtccttggataaaattcaacaccgcttcatgctaaaacctctcaataaactaggtatagatggaacatatctcaaaataataagagctatttatgacgaacccacagccaatatcatactgaatgggcaaaaactggaagcatttcctttgaaaactggcacaagacaaggatgccctctctcaccacacctattcaacataatattggaagtttcggccaaggcaatcagacaagagaaagaaagaaatcatattcaagtaggaagaaaggaagtcaaattatctctgtttgcagatgacatgtttgtatatttagaaaaccccattgtctcagcccaaaatctccttaagctgataagcaacttcagcaaagtctcaggatatgaaatcaatgtgcaaaaatcacaagcattcttatacaccaataatagataaacagagagccaaatcatgagtaaactcccatttacaattgcttcaaagagaatgaaatacctaggaatacaactcacaagggatgtgagggacctcttcaaggagaactacaaaccactgctcaaggaaataagagaggacacaaacaaatggaaaaacattccatgctcatggatagcaagaatcaacgttgtgaaaatggccatactgcccaaagtaatttatagattcaatgctattcccatcgaactaccattgactttcttcacagaattagaaaaaactactttaaagttcatatggaaccaaaaaagagcccacatagccaagacaatcctaagcaaaaagaacaaagctggaggtgtcatgctacctgacttcaaactatactacaaggctacagtagccaaaacagcatggcactggtaccaaaacagatatataaccaatggaacagaagagaggcctcagaaataatgccacgcatctacaaccatcagatccttgacaaacatgacaaaaacaagcaatggggaaatgattccccatcatttaataaatgatgttgggaaaactggctagccatatgcagaaaactgaaattggaccccttccttacaccttaaaacaaaaattaactcaagatggattaaagacttaaacataagacctaaaaccataaaaaccctagaagaaaacctaagcagtaccattcaggacataggcatgggcaaagacttcatgtttaaaacaccaaaagcaatggcaacaaaagccaaaattgacaaatgggatctaattaaactaaagagcttctgcacagcaaaagaaactaacatcagagtgaacaggtaacctacataatggaagaaaatttttccaatctatccatctgacaaagggttaatatccagaatctacaaggaacttacacaaatttacaagaaaaaaacaaacaacccaatcaaaaagtgggcaaaggatatgagcagacacttctcaaaagaagtcatttatgtggacaacaaacatatgaaaaatagctcatcatcaccggtcattagagaaatgcaaatcaaaaccacaatgaaataccatctcacaccagttagaatggcaatcattaaaaagtcaggaaacagatcctggagaggatgtggagaaataggaatgcttttacactgttggtaggagtgtaaattagttcaaccatggtggaagacagtgtggcaattcctcaaggatctagaaccagaaataccatttgacttggcaatcccaaaggattataaattattctgctataaagacacatgcacacatatgtttattgcagcactattcacaataatgaagacttggaaccaactgaaatgcccatcagtgatagactggataaagaaaatgtggcacatatatataccatggaatactatacagccataaaaaaggatgagtttatgtcctttgcagagacatggatgaagctggaaaccatcattctcagcaaactaacacaagaaaagaaaaccaaacatggcatgttctcactcataggtgggagttgaacaatgagaacacatggacataggtaggggaacatcatacactggggcctgtttgggggtgggggctaggggagggatagcatcaggagaaatatctaatgtaaatgactcgttgatgggtgcagcaaaccaccatgccacgtgtacacccatgtaacaaaactgcatgttctgcacgtgtatcccagaacttaaagtatatataaaaaaaagacaccaggctgggcacagtggctcacgcctgtaatcccagcactttgggaggccgaggcgggcagatcacgaggtcaagagatcgagacaattctggccaacatggtgaaacccgtctctactaaaagtacaaaaattatctgggcgtggtggcacttgcctgtagtcccagctactcgggaggctgaggtaggagaattgcttgagcccggggaggcagaggttgcagtgagccaagatcacgctactgcactccagcctggtgacagagcaagactccgtctcaaaaaaaaaaaaaaaaaaaaagacaccaagaagacatacacatataatgactggtaacaaataattgcttaaggtggaatttttaaaagaagcctagatatcttgtttttattatatcatcagttttttttaagggacactgataatggctatatctacaaatgcaaagaagagatgcaaatttgggtaattttccagttatattagccaatgtccacaattttgtccagaaatacctacataattaaagaattaaatatcaggcaacttgaaccatccagctaattccctcaattcctcataacattttatgattgtaaatttaaccagtttacaaagaattggtcttccacaatccaaatgggagctggttaagaagcctctgtaaggcgtttgcttcctatctgctgctgaagcacaaagtctgcagggcaggaattcaggaagggaaattcatcactatcaggccagaacccacaagcatgagctgccactccataagaatagactaaaaccatatccattcttatagtttctaatcttggagatgcaggtatcctgctgaagctggccccttgtcacagagctaaacaaacatacctggtccaggagtcagtgacactgaaggaagatccaggagaaaaggggaataattgaggcccagctctgctttattccaaggtgagtttgcagatcagcaacgaagtgtgtgagctacaaaatggcttttgctttcttcctgccttccagaatagcatgacacgtggctcatgctaactggaaacacagaagaaagggaagtctgagatgggtagttcagcctagccaaactgacacattacaaagctatcacaataagtatgaatttaggcctagcatatggtcagtttccatcaatattccatgtctgcttaaaaagaatgtttgtttttctattggtggacgcaatgttcaatgtatacactctgtcaagcttgttgactatgctatttagatttccttggttttaatcacattttagttagcttgatctatcagttaccaacagaggcagattaaaaattcaagttgttaggagggatttgatttgtttatttccttaaagttctgtcaattatctgttttatgtatttggaagctatgatattaagtaaactaagatgcttttaattatattgtttgtctctggtaataatttttggcttggggcctattcactcaacagagataaacccagaacacaaaagagtaaaaccataaaacttgctctttttttggactttacctgtcttgacttcaaatgatggtggcaaggaaaaaaaaaacctctcatctgaaaactactgtaaaccaaataactctcttttgaaaactactgtaaacttctcatcacatgatatacatccaaaattcacgccacctgtatggtacagacactttagacagatagataattattttaatataattctaggttgataagttgcccaggaaactggcaacaagcaaaggcaatcccagccagtaagaactccaataaatagagtgaatatgatccaaagaacatgatttctcaataaaaaattacagcacatatacgaactaaataaaatgagtggtaatcagcataaacaatagcaaaatcagatccataaaactattggtagtggaatgatcatagagttgttattttatatacaattatttaatagtaagtttcaggaaattaaaaagaggtttgcaaatataagcagttacaaaagaccataagaatgagcaagtagctctgaaaaagaatcaaagaacatgcccagaaattaaagttatgataattgaatttttcaaagtaattgtagctggcagttactcaaaagttaaacatagatttgctatatgacccagcaattacatttctaggcctatactccaaagaacttgaaagcaggcccttagacaaatactcgtacataaatttttataccagcactacttacaatacccaaaagctagaaacaacccaaatgtcaatcaacagatgaaaggataacaaaatgtggtatacccatacagtggagtattatttggctataaaaaagagtgaaattctcatacatgctacaacatagatgaaccttgaaaacattatgctaagtaaaagaagctacatacaaagggtcacatattgtataattctacttacatggaatatctagagtacgcagacccatagagatagaaagcagattggtggttgtcaggagctaggggaaaggagtaatagggagtgcgtgcctaatgagcacagggttttcttttggtttgatgaaacttttttcaatgaacaagacagaagtgatcattgcagttatgtgtatgtcctaaaagcaactgaatcatgcactttaaaatggtcgattttatcttgtgtgaatttaatttcacctctataaaatactcattgggtatgttcaaccgaagatttggcacaggtgagtagtgaattagtgaaatgaaaaatagatgccattaaactactcaggatgtcatagatagacacagatatgcaggatatgttaaaatacacagagggcagaatgatatggtctagaatttcaaaaacagattaaaaattaaaatggaaagaagcatatttgaagggaaaataacagaatttttcagaacaatttgttcaaagattccaaccctcagaaccaggaaacccaaaaagttccaagataaaggaaattcacacctagacatattctagaaaagctgtagaaagcctaaggcaaagaggagatcctagaagaagccagaaaaaaattgacttccaaagcaatgacaattagacagatggctaacttcccaacagtaacaataaaatacaaacaacaggaataaaatattcaatgtgctgagagaaaaaatgctattagcctagactttcaaagaaagcaaaaatatctttcaataatgaaggaaaaatactttttgtaaagacaagccaacaaaaaatcgagagttgtaccaccaacagatcctctctgaagacaattctagttggacatctggttttgggtctgacatgtacagagcttagaagttgccactccatcttaaaaacaagcaaaaagctgaacaaactgaaaatcagtcacccttcttagatccaacaaagaagtgaggtcatagggcaaactgcagtcccccaaattggagagacagagagatgggtcgagagaatagcaacttactcagcagcagaaaccttcgtgggaaccagtgccagtgtaggaaaacctgaactgtaattgatgaattgccagaggttcagtgtggacaagtctgagagttaaaagctccaggaggacctagtcacagggggccctaatcctagggggactccacacttttatgagttttacctgcaggagcttttggcaaggagaagaaaaatggaaccatttaaaaatgcaccagggcattctgttcttaacaaggcctgatgtcaggagaaactattttaccagaatctaatttgctagggttttatcagagcctaacctacctagggaaaaggaaatatccaacttcagcttagacttccatgtagggaaagggaaatactcaaaactctagtcctctctagctttctgtgtgtgagaaaggaaataccagactctagcccactccatccatcttgatgcgtctaaggagatttttaaaactgagaaagaagcactggtgacattcacagcccagtgacgtaggctcaccaaaagactgagacctaatcatagggtgatagaaggctttcattccctcccataccttacaaccacattactaaaagcttgcttatagcagttccttgaaaccagtacactatggtcacttttcaacaaaaaattacaaggcatactcaaagggaagacacatagtttgaaggaactgaagaagcatttgaatcagagtgagatatggcaggaatgtcgaaattattaaagcaggaatttttaaacaaactacagttaatacgttaaggtctttaatcgaaaaagtagacaacatgcaagaacagacagataatgtcagcagaaagatggaaattctaggaaagaatcaagaaaattctgaaagatacactttcagaaaaaaaagttttggatattagttaatattagataaatctaaaaataatttgactggacaaaacaataaattaatatctaactttcgtgactaaataaaagatataactgaaatatttgatatgaaagcatttaagttgtggggaagatgataagggttaaagtgtcataaggttttttattgtctgagaggacaataaaggtgttaagtaaattaaaatactagagtagccactaaagaagactgcttaatgtcccctatatctatcctctttcttatataatgatgaagcctcaatttttagctaaacacatttgttaatctgttctcatgctgctaataaagacatacccgagactgggtaatttataaaggaagagttttaattaactcacagtcccacatggctggggaggcctcaaaatcatgacggaaggcaaatgaggagcaaagtcacgtcttacatggcagcaggcgagagagcgtgtgtggaagaacccccctttataaaactatcagatctcataagacttattcactatcactagaagagcatgagaaagacctgtcccctgattcaattacctcccaccaggtccctcccatgacacacagaaattatggaaactacaactcaggacgagatttgggtggggatacagacaaaccatatcaccctgtgacaaattttcagcctctgaggctgtaatgattgagatgtagtggactgcattttttatttccaaatatatgctgctccttcttgtgggaggattttacctgccattctactgacatgaggtttggctatgtaatttatggtgcccttattttgggaagattgttttcccactctgaggatgtcaggcttggccaagtgactcatttagccaaggaactctcagggggagtcagttttcagcaccatcatgaaggttttcagagcagagtttgtcagggccatgatgaagttctgccatatctcttccttctgccacattcttagcaatgtttcagaaaaagactggttcttcagcgtgggcccaagaatgaagtggcaaagctgcaaggaacatgtaatataaaagagaaatgaacttgggttatgtaatgccatttagattttggaattgtttagtattgcagcataacttagcctgatacagaaattaacatttacaaatacaatgcttctatcataacaacaactacaacaaacaaagcaagcaaacaaacaaacaacttcatatttaaaatataggtattggctttcagactgtgaagtgggtagcaaggcaacttacagcagcctggaaagatggcagtttacactatgcagtggtaaaccattgagtaaaacgattacctttgcgaacttgaaaggcaaataaggtacctaatgaacttatgatttaagtgaagaatgtgcgaaaacagaatgagattctaaatttgtattttaccacaatataattcagcctgaaaggactaatagactacatatgactcatgcgactaaatttatcagtaatcacaataaagtgcatagacgctaccttgaaaagacaagattttcagattagagattttaaaaactccagctatatgctattcctaggagacacatctaaagcataaaggcactggagaaattgacagcataaggaaggaaaacaaacaggcccacaagaacaaaggaaaactgatagaagtttctaattccatgttcttcaactgcgtagatatagctagagcattctgaaactaagacaaatttcaattaagaacaaaatagttcaatttcaattcaaaacagcctcagaggtctttgtcatggactaaatgaattatatctccccaaaattcatgctgaagtcctaacccctagtagctttaaatgagactgcatttggagataggattgtttaaataggtaattaagttaaaatgaggtcattagggtgggccttcatctaacacaactggtgtccttataagaagaggagattaggacacagacaggtagagagagaagaccatgcaaagacacagggagacagtggcctttacaaaccaaagaaaaagacctcaggagaaacaaaccctgctgacaccttgatctcgaacttctaacaaatttctgtctttcaagccaccccctgtatggtactttgttatgacagctctcacaagcaaatagagccttaaggaagagtaattaattgtgatagaagcaataacttatttgatattttcaggccatttgctttggataattctaaagatcacaaaagtgaccatgtgctatggaaagatgtcttctggcaactctgtccttacaaagacacttttaataatgggtcttggcacagaggtaaccagtattgtgccctggggcaggtctcaccattgttctcctctatgggcagccacaaagagccaaagatgcaatgctgtccaagggagtgccatctgggaagaagtttctaaagaaaacagggggctctgtctcctagatttgccattcctatccagtttaattgtaaacatttataagaaaaaaagtcctctttctttcacattacattgggctggagccaaatgtgattcgacatgctgatggtgttgagtaatagcaataccataataatcattttagaaaacaattctctcccatcagctcttgctgaacatatttagatgctggagatagcattagggggtgagaaacatttgtcctttaaagacttcaatttcaagactttgattgttcactggcgttatcaattgttattcatatgtgctaatcaagttattccaatgtttttatttcttcctacaaatgcattcatttagaaaacacttcatgttatccccgagctaattatttaataagaaaaggcttctttcatttttcgctttctcatctctcttctttcaacactgaggtcaggtttctcatctgaaacttcaatgtttctataaattcatacattgagggcattttgttttggtccagtgttttttccccctggaaaaagaaagttgtatttatatgcttctaataaatgcaagactttgttctgctgatcttttcttttttctcaccccctcaggggggtggctagaaatctgcgcaatccttgtttaaaaaaaaaataaagaatgaaagacaatatgatacagttggtctctgttgattacttaaggagtctggtgactgtgaaaatcctgatcaaaggcaatggacaataaaagccaagattgtggggttagaagctgtaggtcagcaggatttagcaaatggcgacagagcattgcttatgatttttaaaatcttcttatacttttctttttcccttatttctttttttcttcctgcttttttatctttctgtctctattttctgcatttcgtttcctttttttttctttcttgtgaaaaaggaacctactaggctgaatcatatatttaaaatggtgatatatctgccaaaagcaattgcgacgaaaacaaaaattgacaaatgggatctaattaaactaaagagcttctgcacagcaaaataaactatcaacagggtaagcagacaacctacagaatgggagaaaatatttgcaaactatgcctctgacaaaggtctaacatccagaatccataaggaacttaaacaaatttacaagcaaaaatcaaacaaccccattaaaaagtgggcaaagtatatgaacagatgcttttcaaaagaagacatacatgtggccaataagcaaatgaaaagtgctgaaaattactaatcattaaagaaatgcaagtcaaaaccacaatgagataccatctcacaccagtcaaaatgatagttattcactattattaaaaagtcaagaaacaacagatgctggtgaggttgtggagaaaagggaacactcatacactgttggtgggagtgtaaattagttcatccattgtggaaagcagtgtgacaattactcaaagaacttaaaacagaattaccatttgacccagaaatcccattattggctatatatctaatggaatataaataattctaccaaaaagacatatgtgcacataggttcattgtagcacaatttacaatagcaaagacatggaatcaacctaaatgcccatcaacagtagacaggataaagaaatgtggtgcttatacaccatggaattctatatagccataaaaaaatgagatcacgtgttttgcaacaacatggatagaactgaagaccatgatcctaagcaaactaacacaggaacagaaaaaccaaatatcatacgttctcacttataagtgggagctaaacaatgagaacacatggatactaggaggggaacaacaaacactgggatctgcttgagggtggagagtggaaggagggagaaaatcagaaaaaatatctgttgggtactatgcttattttccaggtgatgaaattatctgtaccccaaacccctgtgatatgcagtttatctatacaacaaacttgcacatgtatccctgaacctaaaataaaagtttcaaaaaggtcaaatatcagcaattttacacacgtcaatctacgacaacaaacaaaattcaagatttaaaatgtttatttatacatgccaaaaaagaaaataaaagcactatatatttttttttagtagagctttttccttattagagaaggcaacatgatttaggactgacagccaaggctacggatttagccaggcctgagatggaatcccagttctacaagctgctctttgcaaggccttggtcaagtgacttgatctttctgagcctcagtttcctcatctataaaatgagatgagatatctatcttacagggttgttctgaggtccaaattgaggtaaatataaaaaggcatgccatcttataaagtgacccattattgtggcatgaaatacatgtgtgtctgttttatggcatgtttagatgttttgatgattaggaaaatgcaaattaattcaaaagcattactgaatacttatagtttttagccaatacatacagggtaattcaaaaagaattaaacattgaaaaatatgttactcaatgactagtaacatataataagcaccaactcagaaccactcttacagttcatgtgtcttgagaaatctgtggatcatttttgtttcacattgagcctagcccccaagaaatcaataaagagggctggcagagatctctgtgttcctcaggccacggtctagaacattctctataaattgtagaaaatgaaaccttcttgcaccctctgcaggttgtgatagaagcagataaagtaaaatgataaaacttcagttgttgtttctaaactcaggtggacgatgaagagcttgtttctaatttagtgaggtcatttcatttcactagaaaagttaatttccacagcatccatatatgaggccccaaataacaacctgtcactgaaatgtaaaggattccccagtagttaatgctttttgtgctgtatcacacacggggctttgggccagtgtgtgtgtgtgggtgcacacacacacacacgtgcacacatgtgtgtgggaagaacatagtgtcaggagtcataaatcaggatatactgaaggatttttcccacagcttcaggaaatctctggaaaccaaattttccagcagaataagggtccccctcacttccattgtgcagtctagaaataccatcatgaatatatttcagggcgctgggtagggcttactgcttaaatatttacttgactctggaatagtggccacccaggtccccagactatcacaccattgccatcttgtggggtgaggcaagaatctcccagtcctggagaaatgaagggctgcatcctggcagccatttcagacatggacagatgtgccacagcctggggtgaatgaacaagaggagtgtagatttgcctgatttttgtaagaattattgtgatagttcctttacagcaccagatttgactacatgtgatgatataacttgattaccaagtaatatgcctttaaatattgttaattattgttgaatcacctttcattttctcaatcagcgggtactgacagtgtgctgtaggtgtctgcatgattttggtgtttgcaaaagagatttctattctctaggaagtttggaacccttgccctaggccagctcactgagctctgcctggatctctgccatgctctggtctgaactgacctgatatgtgagcctaatatttgtccctgaggcattttctggaatgtgttctacccttgctggagcagagttctctagagcagtgggtagcatcttctcaggacccagagggtcttctacaggacattttgaagagcaaggctgaccaccagccctgtggcaccatttcctctagttggatctgaagacctgattctttaagggaaggaaaccatttgctttttaaaattatgaccccattaaaaaaaaaaagaaagaaagaatatgtcatattctagcccacaagcaagcaaaagctgaggacaaaaaatatataaaaaacaaaaaaataaatgaccaagcctggatggcctgaggaaactcaggatgcttccctggcttccatagggcttctgacaccttttagaagattgttcccccgacatccaccacctttattcatgccacctaccctgcctcttgaggcctctagatgccatcatcccggatgcctcttctgacctacagctgtaaggaggacatagacagacacacgtggtctttcacagcccacaccagatcaggaaatatttggttatgagtgctctcttatttgtggttatttcttgcttttaattttgtagccggcaccaaatctcctactagaggatactgcctcacaagctgacagctctcaaagaggggaaaaatgtcaaaactcagcaaattgcctgagctcattgctggaagcaatacaggttgtctaattaaaaggttgacaaaagcttggtttcttggagcaaacctgaaacacaaacagaaaagctggtggacctgacctgccaccttgttatctgcatctcctgggtgctggctagctctcttcctcttttgttgtggcctaagtacttatttgtcttcattcttggggctgctgccattgtgacccctttaggttgtgggtacccattttgtgacctgcattttgtgtccattgtgtgacctgcattttgccccaggagagggtgtcaggttgaatccgtggattcagataccgagtctgctgaagtcagattgtctgactacaatccacctggcatccatcaaagacaaataaacaagttgtgcttatcactgagttgcctggtgtagcgaaactataaattagaaatataacggcctcctccacagtgtcacgtggctcaggcaaggccctggtagtccttgctcttaactgcgtatatgtgtctttgaacgtcatccatcatgggattagcttgggtgcaaactttgtttaattttgtccttttacatttagaatatatgcattgtttatatttggcctgaaagcaaacaggccaaaagataaacaagggttgcctttgtctggtaactctaggcactttttttcccctttggttttattttatccaaagtttctataatgaggactgaataatgcctataatgtaggaaaacatgaacagttccttttatttttaaaattttgaaaataaaaaatcctaacttaggtgtacatgaggggagctggaagacaaggggaacttagttgaaggagtaggcaaattctgactgtcagatcggagcacccctgggagaaagtcagagccaagttgccactccagcaaactgccatcagccgtctttgcacctcagctctgtgtcctgtcggaggcctgcctattgcagctgccaggctcagccttcctgctgcgacagtgctgatcttcttgcaggatttcaaaccaaggagtgatgttagtgaagtgctttctcccgcctgcccccaccacacccgtgccaactttgcctaagggaatcacaatcacaggacttctagaatgaaggctgtggggcttgtcagttatttttagatgcaccctttgactcttcctactttttctaagcagtctcataggtgagtatgctggagtaaggtggttttcctaagggtttttgtttttttagagtgcctcaatcaattttttgaaacagagggcagatctgtgtcaaaatctgtgtccctttgactaaaccaaccaggtcactcccttccatcagtcctagggatctcatctacacagagccttgcagagttgactgaacagcatggttgtttttggatctacgtacacacagttctagttaaaacatcagtccgttctgtaggaagataaactagccctactgattgtttgtggcaagtgtatttggatgatgataatatttgagcattcccttttaatctgattgacttggtacctgaattgagactggggatggaaaagctcacccaaaatactctgattccttgatgtaagaaaagatcaacaagagctccattcaaagcacatttttgaccaaagggttaatttttttttaatttagaagttatttcagaaaacttattctatagaatttgagaaagttaattttgaactctgagaaagcagagccttcatttattgtctgcttgcttctaaaatggttctgccaaaagttttgcatacaaacacactgtgaagagataatagtgatacaagtcatgcagccaagaatcactgggggaaatgcaaatccgctggcttttcagctcagaggcagcaaatgctgaagtcatctcatattcacccgaggccctcagatctgcacatcgatatatgaaattggaggctaatatgcagatattgatttctctaaaggggagtgtcaatatttacagtcccaagaggtggcaactgactgaagcaaaaccaaagttgtgatggcgactgccaaggtcacggccgaaccataaccctgctcttcacaagacaggtcagtgcctccacccccaaatagtgccagatgatttagagggaaggtgaaattttcatctggtcccctagacatgaccagtccatcacttcatatccaggtgttgtaaaactccagacgactgactagatgtcctccatcacataaacttagtcaaattaaaatcatcttgggcaaggggggctttttcaaattaattgttcaggacaactcttcccaaaattgtgatgctactatagcagtgcatgccccttagaaatattgacataattttctaaggaaacagcagtgatccctaaccctggctgctcattagaatctacctccagagattcagagttaactgatctgtgccagggtgcaggcatctgtagtttttaggagtgcccttagcgagtctaatgggagctagtgtcgaggaccactggtctacaggttctccacctccctttcccatttcatccctgcttctccactagctacacctcatatccgagtcttatgtttgcacttacctactttttatgtttgtgtatctttgctcaagtcatgtctcttgtgagaaattatccacccatatcggggtacttattcttccttatatgaaccattctctgagtaggtcccaactcgaatcaccttagaattttcccacttctccatgcctccagcaagccatgcatcacaccagggcagtttcaagtggacagacctgtttctcctggaagtgggtgggctccttgaggtgagagaccatgccttgcttccctgggtgcctaaagcatgcccacccagcttagtgcaagtcacagtagccactctatcaatactggttgcaaagatggatgaaaatgcaggttcatgtttggtatcaggaccttttagaaatcagggaagactagaatcatttgtatatttgagggtagtcagattttttttttaagtaaaaaaaaatcccaattttaaatttgaggttcttggcgcatatgagaccagggtcaaatgtcccccagaaccctctctttatgatgtcgtctttggataccatcaggataactcagattggttcagccccaagtgcccccagttacctcggtaacacatagaatataactttgtcccctaatgggaaagaatgtcagatttctatgccaaccagaagatggatggatgtcaagacagatggtggaaaagttgtgaggtagactatttatattgggtggggggttcttccttttatttcaagacatgcccccacttcaaattcctctttttaaattttttatgtaactcattattgagtgcaaaatttttaccacatgaatctgcatcgacataatatttatcttgtatacaaaaagcaatgaaacagagcagcagggtcaaaacaatgtcagcatcaaaactttcaggattaatatctgtggactgaagaacattccagagacaacagtggtgccttgtttgaaaaactgctgcatcaccaacactgttgatggtaaagaagataactgtgtgaaaaatcacagattttaacaaagcattttagaaaagttataccctaggtgaagaagttttaggaatgccttcactcatgtatttcgcttatgatttcctttttgtgtatgcacaaaagctaaagtaaaaagtcatagccatggttcttatttaatttactatgtttattcttacttcatgatacataaaatagtggtgtctttattagtttgccagggatgccgtaagaaagtatcacagattgggtggcttaaacaccacagatgtattttctctcagttgtagaggctggaaatctgaaatgaaggtattggtagggtttcttctgaggtcatagtttgtagatggccattttctttctgtgtcctcacgttgtcttccctttttgtgtgtctgtgtcctaatcgtcttttttttttttttttttttttgggataggttctcagtctgtcacccaggctggaaaggatcctctcacctcatcctcccgaatagctaagactacagacaggtgccaccacgcccagtcaatttttgtatattttgtagaaacagggttttgccatgttgtccaggctggtctcaaactcctgggctcaagtcatccaccagcctcagtctcccaaattgttggtattacaggcataagccactgcaccctgccctaatctcctcttcttataaggacacttgtcatattggactaaggcccacccccccgtcctcattttcacttcatgacccctttaaagaccctatctccaaatatcgtcttgttttaaactaggaattgggacttcacatatgaattttaagggaacacaattctggccataacagtggccttacaattgatggcttcttactttcagtgaaatttaaagtatatacttcagaagattgtaattatattaaatgagtgtctgcagctggaatgcactccctgatccttagctgtttatcattacctgtttcatagggtggttgaagggactaaataagatagcacttccgaagtccttagcacagaaccaagtatatagtgagtgctcaatgaatgttggctactatgatcattattaatttggaagcattttcatatgagtaagaagttactgagaaaaaaaaaatcacagtactctcttaaaataggtagtgatctttttaaaaaatcttagaatttgatgatgactttgaaaaccctagtgtacaatcaagaaagcactaagttggcagccacgattcaggcataatgcttacaagattactttaatgtacaaaagtgttttgtaattacctaattgtctggcaccacttcaagtcctattttttaacccctttaagccaggccagaaacattgccagtgagtgtgacacagtgatgcaaaatgcattaagcttttacagcagagcctcaagacccccaatggcatcaagagattaataattggagtaagaaagatagatgtattttatgaataattcagtctatcattagaaattagaaacttgagagccttgctacatgggagagtaaacagaagcttgccttaatgggttataattttaaaatgaggaagactttgccaattgtcactaacgtaagcttcaagcacacttctcaatgaaaagaaactccctagaaatgaggtcacccactggggtcaagttcaagataaagagatgaatactttcctgctctggtttaccaactgcttctttgtcatcttgaataaaataattaaccgctttataagtaaacctgtgaagttttaaagccacacacatgttttatctctaaaccaggcatccttcaccaagccataccatcagattgcttcttccatcctcaacacccagagtttttcatggagtccacctttattaaaatttcccaaccaaccctggagctttctaatactgtcaacaaaagaaaactagtcatggtagtcctaggaagagtttgtacattttgcgcctggctttaggtgtgtaaaactcccatctttgccttcaaactcaaaggagtcactcaaatgatggacatttccattcaagcctgagggaaggattttgttaagaaaatactgtataagtctgtacatttccatctattaaaaacagggtatggatcggtggcagagacaaagctgtgtgctcactaaacccatttcacgctcttcctgggaacatagcaaagccactcttcccagtctccctgtgcagtcactggggccttgttatgagttccagccaacttaacgcataacactctcaggtctagacctaaagctcccagagtcatcctgtcctctctcagctaccatcttccacctggataatatgcaagcttggagacaagaatgctccgggcaacctccagagacaagtactgaaaatggcagaagcactgtttggaaggagcctggatcctgaaggtctgcagagtgcatactctccacctttactgaccatatcactttgtcacatatgggagaaagtcactttgactgtggttaagccactgagatgtagtggttgcttttttacagaagctagctgtgtttaccttgaatactataggtattgattttcctgataggactaatataaggattaatttatttgttcgctttttaatttattcaacaagtatcgtttcaaatccactacacaagagtcaggctgctagacaccagttcatgaagtagagtcaactgtgattcagagcttggactttggaatcaaaataggggttcggatcctgcctctgtcacttaccagctatgtaactttgaacatgttacttaatttctctgtgcttcagttttttcacctgtaaaataggggtaataacactatctacctcatggggttgttgtcctaagaattaaatgaactaattaatgcatgcaaactactttgttccttatccagtgtatatctcaatgaaacttgatattattgcagagtcaattattgcaaatctccaattttctaaattcaacataaaatgagctgttattagtagtcaaatttataagtacatcgtacttgtgtagccaagaaactcaaatccagtgataacccttgaagggactgaaggaatgtgatcaccaaggcaggttcccagcacctgctctcctttggataaataggcatgcgctctggcagtgcatgccagaatatctcattttagttaagcaaaagtataaagttactggtgagtttatttgaagatttggaagaagaagaagaagatagaaaatgaaaattagaggaggttttccttacttcaggttgctgacacaaacatttccttggttctctggaggcttttccagtggggttggcccattaaataaatatatgtttctttttgcttttagaaaatccagtaatgcaaactcttatgtttatttaatattttcctatttgttttcctagccaaaataatgtctgctgggcaggcaattccttgagaagatccagtataccctgtcctgacacagagtcaagagttttcaggaagaaaatacaaaatgccattttagagaaagaattagatgggctggtattcagagagtccattaacctggagtaatagcaaaacacacacacacaaaacaaaataaaactctggataaattggcattgaaagactccaggcccagaaaataccttttaaaaacgtttataatatatatacttctctgggccctttgttctgatttcaattgtcagtagctaaagaaagtgaacttttatgatgtgaattaaggaactggagaaaatgggagattacgttaaaacaaaaagctggtgacttgctttgggagagaagtaaaacccaaaccaggttacaaataagccctccttgactatgcacaatgcccatgggttgtaccaaaaaagacagtttgagcaaagatctcagggcattaaaaatgggaaggctgcaacttcctaaaaagcaaaccaggcaggtagcttaatctattttccattacgaactgaaaagattgcattgtcccaagcaccaaaaaaggtcagtgtgaactttaaaacttccattttatttgttcagcactttgcataggacagagccatttgtgagcaagaaaaacaattttgtgactagaacctcaaaaagtcggaggaagatagaagcagcctcttcttggcactgcccaggatgtgaccagataggtcagcagctttctgtgcctttgtcctccagtactgtgcgtagaaaagggtctgggccaggagtggtgccacgcgcctatagtcccagttactcaggaggttgaggcaggagaattgcttgaatccaggaggcggaggctgcagtgagccgggacagcgccactgcactccagcctgggcgacggagcgagactctgagactcagtctcaaaaaaaaaagaaaaagaaaagaaaagaaaagaaaagaaaagggcttgggaaccagctgccccctgtgggattagatcctgcaatttctgaaaagttttttgaacattcttgattaaggcgaactaatcatgtttacttttcagtggtctttcactttaaacagagtgttttctacttttgaagaaagaaactctgtctaccatttgaagtcagaaaatgagcttaacaaactgagttaaggggttaccttttgaaaccagttttcattcagattgggcccagcatttccgtagcagcccaggacccccaggagaaaggaacagctctgttttcatttcattctctcatgtccacattccaccatagttgtgactctctggagttgtctttggggaatttaggactgatcaagaccttaaaaaggctatacagcaacaggaaactccagaacaaatccttcccaaggagaactttccaagcctggaaatagctccttctcaacctgactacctaaccaccactattggctgttagtggaacttcaaccccaagttagaaatttggtaccagatcagttctgtgtgtttcatatatcacctcaatttaatcttcacaataaccctaataataaataataaatatatgaggcaaaacaataataaatatatgaggcagaatgattattatccaattctataggtgaggaagctgaggcccagagaagttgggtaacttaccccaagtcatactgctagtcagtggcaaagctagtattcaaatgcagagagcatgaccacaaagcgtatgaacttagccactaactatattacctctcctaacatctgaaatctttaagagaagaaagaaggtatctctgacattgaaaatgcaggcaaattgatggggagatttttttttttaagcagagtagcactcctagcactctttatttcacactttgcaggggctcatccattcctgtaagactctccttggtgacatccacaggactgctgagcttcaagtagtttctactgggtctcacagtacacttccctaggacatcattatcctggcagatcaagtaccatgggaggaagctgctctcagtccctccaaccaaataagctattcacattttccaagatccctgattatgtgcctgaatagaaaatttggtttctgattaataagcatccttgcctttatgcttctacaaaaagcgtttgtgctaataatgtgatgcttaataatgagatgtctgtcacaggaagggaaatggcaatggggaaacaatgatgttgggccgagtttaaatgtcatgcttttaaaaaaaccttcaccccaaagagtcacaccgaagtcacttatgtgtgctaaaggtgttgcaaagcagagatggtttttttctttcctgtttcattggtgatttcagggtgcttttgcacttttcagaagggtcctggatctggaagtgtctaagcatcaggctggcagagcttggcagagtgacattcctgccaagttcaggacaaatctatttctccctctgttaccattagaaccttcatctctacatttaggacatgacacgtgccaaactgcccaattactccttgcctgtcattaaagtgtgcagctaaacactgggtttgagaatacatcatcgcaactgtctaaacacaagcccaagtgtattcaagagccccagagaggatcagggtacaggactaaaacaattcaaatgggccaacattcaaaatgtcatatacagtcatgcacaaaaaaaggttgtgcctgtggagaaaactgaattgacatccataaagcataaaggcatgagttttgtgttttctgagcttctgggagggcccgccctcctctgccttgcctgcatggctcattgcctgtgagggaacagtgagaaaggctttgttttgaaagaagcctggccagatagatgacactagccaagtaccctggcagtcctgtaaaccagcttgattccagtcaaatcagaggggactgatagaaataggaggagagtgctggagggggcaactggttagtataaaaaataaaaatagccattttgactaaattatattggagaatctaaaatatagaaccactgcgaagagtaacctagcctatctggtcagcataggttaagttatgacacagtaataagcaactctagatttgtggtggctgaacccgacaaaggcagatttcccaaaatactcgttgttcatcactattcagtagagaggcttcactcatcatgcccctcatagatccaggctgatggaacagccaccatctccaataccatgctttccttttccagagggaaagaaagccctgtagggtctcaaagtagcaactaaatgatctggcctggaagtgatgtcatctcatctgctcaagattcattggccagaattagtcacatggccccagcaaccacaagagggccatggcgtgtactgccatctaccattaatgactaccacagccatcctaggtcacatctctaagcagcaaagttggagtcataactttgcacggtctatgactaacacaaaagcaggggctcacaggcctttggcccagcctagctatagagttaatctaggggcctctgaggatggggagaggcccttgagaatgggttgctttccacagcctagaactctagctttggtcagataccccattcttactcctgaagaggtcagaatccctagcttagtcctacaataattgatcccttgcttatctttgtggagtcccccagattggggaaaatttgaaaacatattgaatcctttggactcttcctggcccaggtgctcctgccttcttggtaggagaaaaacagatccccggagcaggggctgtagggaactattttctgacattggttccaatccagaattcctgcaagaggtctgtgatagctgcagtatctgtaaactgctaaagaatacaccttcccagatgtgtattgctatttttagaatgcatgcagcaattgtgatccataaaatatacattcgattttaaaaaggtactgagttcattttatcattgcacattttctcaatctgcagctcctcaaagcaatttttagcataatttgggaggggagtgaggagtggtggtggtctgccagattttgttttgttttgttttttgacattataaagatataaagaagaccttgtactgttggaaatctctgctccctgaattaaaactgatttacatagcgccattaccatattacagtattctgtatttgcctatatatttattttatcagtggcttttatgctttcgcatgctttcatattgcttagcatccttttgtttaacttgaagagcttcccttagcaatttttataaggttggtctagtaatgatgaagtccctcagcttttgcttatctcagaaaatctttatcactcccttatatttgaaggacagttttgctgggcaggttagctgcatagggtgctttgtgagggtcttttttctaggcttctcagacctttttggtgaaatttctggacaactaatagcaatatgtaaacatttcagtggttgcttttgaagctgatatttgtcttctgagagaattatcccattgagagtgggataaggcaggaggataagtagcatcttgagaataccagactaaagcttcgtataaatagaaccactgcctgctgggaggtcagtgcaggtaacatttggtcaaggggcatcaacagaagtactaaatcaacaattagggagctggaatagaggggattatacacacaaaccctccagcgcccattgcaataactaaatggctggcatcacttatttcaggtgggtcagagtaatctgcccaaagttgtaagtggagtgaagggcaggtgaaggtcaggattatagcaatattccagcccatgattttctgtcatgttagcacaaaagataaacccaactgtctggccactttcatttgtgggtagtttatcacacaagctatgtcaaataaaccaagcctcctgcacccatcaccgccccaccgtatatggggccaaggaaagttttatgtcctgaaggccactatttgtgacctagacccaagggagcccccctgctctgaaccttgctttgaaccctgcctcataaggggtcaccagtgtgacttcatagccagtaaggccaaggacatgacttcttgtgttactctgagtccccatgtgtctttgtaataagttcacatcagttagtttgtgactcttacttttgactctctccttagaggtctatcaccattattcatttgcatgatggcagttcttttttcttaatggtatacaatgagcaaaaaccagaatagaaattccacctttggccgggtgcagtagctcccacctgtaaacccagcactttgggaggtcaaggcaggcagaccactttaggctgggagttcaagaccagcttgggcagcatggcgaaaccctgtctctactgaaaatacaaaaattaacctggcatggtggtgcatgcttgtaatcctagctactcaagaggctgaggtatgtgaatcacttgaacctgagatacagaatttgcagtgagctgagatcgcaccactgcactccagcctgggtgacagagcgagactcctgtctccaaaaaaaaaaaaaaaagaagaagaagaagaagaaaagaagaacagagaaagaaagaaagaaagagtccctcctttgtgtctcagtccttcttatttaagcagtttccagccaaaaccccaaggtggttgtcctaagctcccctctcaaggctaggaaagagaaaaagggagatggggttggtctgcagctaataggcatgggaaacaggaagtcaaaggcattatttggtgaaaagagagacttggaggaaagctgcaatccaaagcaccacatacacggggggctggcaggctcccaatcccaagagaagcacctgcaatctgccagacgatggtagcgaggattctgagagccgaatgtggagaaattactccagcattgattcacagagcccagctcctcttatgaggcttccgggtgcagctgtgggtggagaaggaactggtgaaggagaaaatgtttggactttactttctgtgtttagtgtaaacccaagggccccttggagtccaaaaattattggagagtaaaagagcactggcagccgtggggattgcagccagtctttgctcagcaggctgtcttccagtaagattaggatcacagagctcatcagccaaaacccatctctgaatgtccagggtgaatggtgtgcacacacagaaataatctattgccttggccctgggggacaatcccgcggccagacccgggttgaggtcagggcctgcaggctgcctgagaaagctaataggacaccatgagctaatggagtgaacccagataaaaagaaagggcttaggagggacagaagaaccgcagagcatctccttgctaatgaaactccttgagacatgcagaagcaagaaagttttggggggagcaagaatctgcattcttaacagctcccaaagtgattccactgcaggtggtgccacaagccacattttggtagacggcaggtttcagaggacggacacgtggcatcctgttgacataggaagcatacttttcaattttcaaatgtttttgtaaatctccaggagatagcagtttgctgagttggcaaatgggcagcacttgggcagataatgggctgagcttgtggggccaggggccagcctgctgtaatcttccaggcctctacattctcttctcaggcacgatggcaagaccaaagggaacagtaaaaaggttctttgggggacagggagatagctgggagtcctgtgccaagggtattgtgtaccggcctcccgtgcgagtagggccctgcacacagacacaaccacaggtagtcatggcaacttttgtgtctaggacgtgtgcatgccagcttgcttactctcttgtgcagatttgcccttggccttactgaatgtaaatctgtgaaatgaagatcaaaggtatcttcgtacaaggacctggtcctctgcctcagggtctcaccttcatcttgtcatgaagcctgcatcctgagtctatgatctcaatgtttctgaaactggagtctgagtaatttttagaaaccctagacattctttatttggggttttatcttaatgataatcgtaaaacagaagttttaccagttataaagacaagagttttcttttggagtagcaattcccatttggaagtcctcttccatcaaataaaatttgatttttttttaagtcagtgtctctctagctgtggtcttcaagagaatagcagatctttctgtacattctcagtgatctatgtgaatggtctttttctttcctctcttaaaagtggaaaacaatgttttctttgcaatgtgacaatagtttagatacaagacccagaagtgaaattctatttggctttgtaatgactttgggtggaaaatctccaaagatgaactatgtcttgtgccaattcatttgaactgaattcaatccaacaagtatttatggaactgtggtcttgatgctacggcaggcacaagggaatagagagtgctaaggatcctggtcctcttgggggagaattattgtacaaggatctatgggagcattctccctggaggaggcagaaaaagcttctcagaaggatgagctcaccagaatgactgggggagagagagagagagagagagagagaagcaacagcagcatgggcaaaggcatggcactgccagtagtctaccatgactggaatataaggttggagggtagatggcctgggaaggtagagaaatagtcaagaaccatgtgtgctgtgcttaggagcttcagcttgttggcagaaaaatggggccactgtttggggttataatgcctttctgaaatctctgcctctgtatgtcttcatcaccctctcttgattgaaaagcctgaactctctcaagggccattttttattggtctcacactcctaggtataaagaggtaaaaaatactgtcatcttagcaatcagtccagagttccaattaggaaaagacatgtctttgtgtgaaaaataatatgttgataagaactcaaggtagattccaaatacctgagaattc

SEQ ID NO: 103 - DNA, 160213 bp, Homo sapiens
gaattcctaatagagcagttcttataaactgctatgtgagtttagtaagatttcaggatatatgatcacatacaaaaattggtttcacttctatataatgagtgatcaatcagaaatggaaactgccaaaattgccattgacaattgcattaaaatatgtgattttaaggataaatctttcaaagtatgtgcaagatcagtacactggaaactacaaaatattgctgagagattttaaagaaaacctaagtaaatgggaagatacactttgttcatcaattggaagactcaatattgttaagatgttagagacaatgttctctaacttgatctacagattcaacacaatcccccaaaaagctcagtaagactttttgtaaaaaaaaaaaaaaaaaaaaaaaaaaaaagacactgtaattctaaaattcatatagaaatgcaaggaacctaggataggcaaaataatctcataaaagaagaaaaaggtgggaggacttatagctcttgccttcaagacttattttacagctacagtactcaagacagggcatgttttggcatcaagagcaacagatacgtaaatagaatgaaatagagaatgcagaaataggtgtatacttccatttctgttgctttctgataaagttgcaaagacaatttggcagagaaagtatagtctttttttattattattatattttaagttcagggatacatgtgcagaacctgcaggtttgttacataggtatacatgtgccatggtggtttgctgcacccatcaacccatcatctacattaggtatttctccgaatgctatccctcctctaaccccctacccccaagaggccccggtgtgtgatgttcccctccctgtgtccatgtgttctcattgttcaattccagcttatgagtgagaacatgtagtggttagttttctgttcctgtgttagtttcctgagaatgatggtttccagcttcatccatgtccctgcaaagcacatgaacttatcattttttatggctgcatattattccatggtgtatatgtgccacattttgtttatccagttgatcattgatgggcatttgggttggttccaaggctttgctactgtgaatagtgctgcaataaacatacgtgtgcatgtgtctttatagtagaatgatttataatcctttgggtatatacccagtaacgagattgctgggtcaaatggtatttctttttttttttttttttttttcagaccgagtctcactctgtcacccagactggagtgcagtggcatgatcttgtctcactgcaagctctgtctcctgggttcacaccattctcctgcctcagcctcccaagtagttgggattacaggcacccaccaccatgtgcggctaatttttttgtatttttagtagagacagggtttcactgtgttagccaggatagtcttgatctcctgacctcatgatctgcccgccttggcatccccaagtgctggcattacaggcgtgaggcaccgcacctggctgtcaaatggtatttctggttctagatccttgatgaatcgccacactgtctttcacaatggttgaactaatttacactcccaccaaaagtgtaaaagcatccctatttttccacatcctctccagcatctgttgcttcctgactttttaatgatcactattctaattgatgtgagatggtatctcattgtggttttgatttgcatctctctaatgaccagtgatgatgagctttttttcatatgtttcttggccacataaatgtcttcttttgagaaattttcatatccttcacccacttcttgatttttttttcttgtaaatttgtttaagttgcttgtagattctgaatattagcccttgtcagatggacagattgcaaaaattttctcccattctgtaggttgcctgttccctctgatgttactgtgcagaagctctttagtttaattagatcccatttgtcagttttggcttttgttgccattgcttttggtgttttagtcgtgaagtctttccccatgcctatgtcctgaatggtgttgcttaggttttcttctaaggtttttatggattaggttttacatttaagtctttaatccatgttgagttaagttttgtataaggtgtaaggaagtggtccagtttcagttttctgcatatagctagccagttttcccaacaccatttattaaataaggaatcttttccccaatgcttgtttttgtcaagtttgtcagagatcagatggttgtagatgtgtggcattatttctggggcctctgttctgttccattggtctatatatctgtttttgtaccagtaccatgctgtttaggttactgtagccttatagtatagtttgaagtcaggtagtccagcttttttttttttttttttttttttgcttaggattgtcttggctatatgggcccttttttggtttcatatgaaatttaaagtagttgtttctaattctgtgaagaaagtcaatggtagctggatggggatagcattgagtctataaattactttgggcagtatggccattttcatgatgttgatttttcctacccatgagcatggaatgtttttccatttgattgtgtcctcttttatttccttgagaagtggtttgtagttctccttgaagaggtgcttcacatccgttgtaagttgtattcctagatattttattctgtttgtagcaattgtgaatgggagttcactcatgatttggctctctgtttgtctgttattggtgtataggaatgcttgtgatttttgcacattgattttgtatcctgagactttgctgaagttgcttatcagcttaatgagattttaagctgagactatggggttttctaaatatacagtcatgtcatctgcaaacagagacaatttgacttcgtctcttcctatctgaatatgctttatttctttctcttgcctgattgccctggccagaatttccaatactatgttgaataggagtggtgagagagggcatccttgtcttgtgctggttttcaaagggaatgcttctagcttttgcccattcagtatgatattggctgtgggtttttcataaatagctcttattattttgagatacattccatcaatacctagtttattgagagtttttagcatgaagtcgtgttgaattttattgaaggccttctctgcatctattgagataatcatgtggtttttgtcattggttgtgtttatgtgatggattatgtttattgatttgcatatgttgaaccagccttgcatcccagggatgaagcccacttgatcatggtggatgagctttttgatgtgctgatgaatttggtttgccagtattttattaaggattttgcattgatgttcatcagggatattggcctgaatttttccatttttttgtgtctctgccaggttttggtatcaggatgatactggcctcataaaatgagttagggaggaatccctccttttctattgtttgggatagtttcagaaggaatggtaccagctcctctttgtacctctggaagaatttggctgtgaatctgtctggtcctgggctttttttggttggcagcctattaattactgcctcaatttcagaacttgttattggtctatttggagattcaacttcttcttggtttagtcttgggagggtgtatgtgtccaggaatgtattcatttcttctagattttatagtttatttgcatagaagtgtctatagtattctctgatggtagtttgtatttctgtgggatcagtggtaatatcccttttgtcattttttttattgtgtctatttgattcttctgtcttttgtctggctagtggtctatctattttgttaatcttttcaaacaaccagctcctggattcattgattttttgaagggtttttgtgtctctatttccttcagttctgctgtgatcttagttacttttttttgtcttctgctagcttttgaatttgtttgctcttacttctttagttcttttaattgtgatgttagggtgttgattttagatctttcctgctttctcctatgggcatttagtgctataaatttccttctaaacactgccttagctgtgtcttagagattctggtatgttgtttctttgttctcattggtttcaaagaacttatttatttctgccttaatttcgttatttacctagtagtcattcaggaggaggttgttctgtttccatgtatttgtgcggttttgagtgagtttcttaatcctgagttctaatttgactgcactgtggtctgagagaccatttgttatgatttccgttcttttgcatttgctgaggagtgctttacttccaattctgtggtcaattttagaataagtgtgatgtggtgctgagaagaatgcatattctgttgatctggggtggagagttctgtagatgtctatcaggtccacttggtccagagctgagttaaagtcctgaatatccttgataattttctgtctcgttgatctgtctaatattgacagtgggtgttaaagtctcccactgtcattgtgtaggagtctaagtctctttgtaggtctctaagaactttatgaatctgggtgctactgtattgggtgtatatatatttaggatagttagctctttttgttggattgatccctttaccattatgtaatgcctttctttgtctcttttgatctttgttggcttaaagtctgttttatcagggactaggattgtaacccctgctttccctgattttttttttttttttggtttctatttgcttggtaaatattcctccatccctttcttttgagcctatgtgtgtctttgcttgtgagatgggtctcctgaatacagcatgccgatgggtcttgactctttatccgatttgccagtctgtgtcttttaattggggcatttagcctgtttacatttaaagttaatattgttatgtgtgaatttgatcctgtcatcatgatgatagccggttattttgcccattagttgatacagtttcttcatagcgtcaatggtctttacaatttggtatgtttttgcagtggctggtaccagtttttcctttccatatttagtgcttctttcaggagctcttgtaaggcaggcctggtggtgacaaaatctctcagcatttgctcgtctgtaaaggattttatttctcctttgcttatgaagcttagtttggctggatatgaaattctgggttgaaaattcttttctttaagaatgttgaatattggcccctactctcttctggcttgcagggtttctgcagagagatcctctgttattctgatggacttccctttgcggataacccgatctttctctcttgctgcccttaacatttttttccgtcatttcaaccttggtaaatctgacaattatgtgtattgggtttgctattttcaaggagtatctttgtggtgttctctgtatttcctgaatttgaatgttggcctgtcttgccaggttggggaagttctcctggatcatatcttgaagagtgttttccaacttggttccattctccccatcactttcaggtacagcaatcaaacatagatttggtcttttcacatggtcccatatttcttggaggctttgttcattccttttcattcttttctctctaatcttgtcttcatgctttatttcattaagttgatcttcaacctctgatattttttcttctgcttggttgattcaggtattgatacttatgtttgctgcacgaagttctcgtgctgtgttttttagctccatcaggtcatttatgttattctctaaactggttagtctagttaacaattcctctaaacttttttcaaggttcttagtttccttgcattggattagaacatgctcctttagctcagaggagtttgttattacccaccttctgaagcctacttctgtcaattcatcaaactcattctctgccaagttttgttcccttgctggtgaggagttgtgatcctttggaggaggagaagagacgttcttgttttgggaattttcaacctttttgcactggtttttcctcatcttcatggatttatctacctttggtctttgatgttggtgaccttcggatggggtttttgtgtggatgtcattttggttgatgctcatgctaatcctttctgtttgttagttttccttctaacagtcaggcccctctgctggaggtctgctagattttgctggaggtccactccagaccctgtttgcctgagtatcactagcggaggctgcagaatagcaaagattgctgcctgttccttcctctggaagctttgtcccagaggggcaccagccagataccagcttgagctctcctgtatgaggtgtctgttgaaccctgctgggaggtgactccagtaagcaggcacagtggtcagggacccacttgaggaggcagtctgttccttagcagagctggagtgctgttctgggagatccatggctctcttcagagctggcaggcaggaacatttaagtctgctaaagctgcaaccacagccaccccttaccccaggtgctctgtcccagggagatgggagttttatctataagcccctgagtggggctgctggctttctttcagagatgccctgcccagagaggaggaatctagagaggcagtctggttacagtggctttgccgagctgtggtgggttctgccgagttcgaacttctgggcatgtttgtttacactgtgaggggaaaaccgactacttaagctcagtaatggtggatgcccctccccccacgaagcttgagcatcccaggttgactttagactgctgtgctggcagcaagaatttcaagccagtggattttagcttgctgtgctccatgtgggtgtgatctgctgagctagaccacttgggtccctggcttcagccccctttccaggggagtgaacagttctgtctcactggcgttccaggtgccaccaggttatgaaaaaaaaacaaaaaaacaaaaaaacaaaaacaaaacaaaaaacctcctgcagctagcttggtgtctgctcaaatggctgcccagttttgtgcttgaaacccagggcccttgtggtgtaggcacctgagggaatcttctgatctgcaggtaggcaaagactgtgggaaaagcacagtatttgagccagaatgcaccgttcctcacctcatggtccttcatgacttcccttggctaggggagggagttccctgactccttctgcttcctgggtgaggcgacgccccaccctgctttggcttgccttccgtgggctgcatccagtcccagtgagatgagctgtgtacctcagctggaaatgcagaaatcacccaccatctgcattgatcttgctgggagctgtagactggagctattcctattaggccatcttcctagccacacaccaagtatagtcttttcaacaaatgaggctggaacaattggatatctatgtgtaaaacctacccccaaaatgttgatacatatacagcaccatataaatcattaattcaaaatgaatcagacttagatgtaaaacctaaagttctaaaacttgtttaagaaaatattggagaaaatgtttgtgactttcagttgggcaacgatttaagataccaacaacactgtgcataattgataaattatacttcatcaaaattaagttctgctcatcaaaattaataagttctgctcatcaaaagatacttttaagaaagtgacaataggccgggtgcggtggctcacacctgtaatcccagcactgtgggaggctgaggcacgcagatcacctgaggtcaggagtttggggccagcctggccaacatggggaaaccccatctctagtaaaatacaaaaattagctgggtgtggtggtgcatgcccgtggtctcagctactcaggaggctgaggcaggagaatggcttgaacccaggaggtggaggttgcagtgagccgagatcgtgccattgcactcctgcctggacaacagagcaagactctgtctcaaaaacaaaacaaagaaagtgacaatactgtattgtatactaaaaatttttctaaaagggtagatctttttcttgttttttttttttttttttgagacggagtctcactctgtcgcccaggctggggtgcagtggcacaatcttggctcactgcaacctgcgcctcctgggttcaagcgattcttctgccttagccacttgagtagctgggactacaggtgtgtaccaccatgccccactaatttttgtatttttagtagagacggggtttcaccatattgatcaggctggtctcaaacttctgaccttgtgatctgcctgcctcggcctcccaaagtgctgggattaccgtcgtaagccactgcgcccagcagaggttagatcttaagttcttatcacacacacacacacacacacacacacacacaaataataataataaataataaggcagaaagacacttggtgatcacaagaggtttatggcacatattgtggtataatctatggcataggtttcatgggtggatgcttacttccaaattcatcaaggggtatacataaaatatatagggtttttttggtataaaagtaaataaaatacatttaccaccattatatttcaggaaaaaatctcatttagtctttttatattatacgtttaacaaacgctagtttcttgttgctgatatgttagaattttgcatatatcttttgttattttgtaatttttttttatatggcatctttttcaaaaaagtctgtattaatgttacagtcgagttttccttcattctctatgctctggagtctagaacagttaaaatccatgaaatgtttcctagaaaatggaagaacttgcctatgaatacaatcttatattgattactcggccaactacttgctctgaagtctaataagattattacctcatgattcctggaaaaatgccatgttttctcattcatccattcctacctgtgttcaggtctcttggtttctaattttgtttctgtccctgtttgtttgactagttcagtcttggcattacactagctctcttggcatttgttcttagttctgtgaaggtgaatttgataaactttatcgatatgaagggcaggatattttgcccaaagtgtgtaccccttataagcaggcagggaagaaggaggaattagaggagacaaaatgaagatgtcaatcatttgaacccttagataattctatgataaattataaattgtagaatattttctgatatgtagatttatctatcagctaattaattccttcttaattcataaaagcaccatgttttgttttcctgtgtaataacaaatattttctaatttcacaaattatttcaataaatgaaaatgtgagccacggatttaagaaaatcttttcaattcacatctttgatgaagacttgcatatgcaacctataaagaagtctcaaaatctaataagaaaactagcaacttaataaaaaataagcaatgtatttaaatggtttaccaaatatacttcatcaaaaagagaaattggacggaaaataagcacatggaaataagcttaacatcagccatgaggaaaatgcaaattaaagccacagtgagatacttctttaacctattagaacgtctcagatagacagaccattaggcaaatgaagggcaatttacaaaatactggaccagtacccctccaaatgcctgataataaataccaagtgttagtgaagtaactgcagtgctcatacaatactgtgggagtgtaaagcaatacaattttggaagactatttggcaattcctaaagaatttaaacttatacctgctatgcgatccagctatcccattcgtatacatttaccaaagagaaatgaaagcatatgtccctacaaacctttattcacaataattttatacctaatagtcccaaattggaaacaaccaaaatgtccatccttaggtgaatgagtaaacaaaatgtacatgttagaacgtggattactttatgttgattttattcaataaagctgttaagattgaaattcaacttatgttggattttaattgaacaaaaatttaaatatttccctcatcagattaaactcatattaaactttcctttagccctgtattataatgtcttgattcacaaaggatttcgtgtactaaattcttcctggttattgtgattttctgttgactcctgtttagatcttatctcctgggccttattcacctcgtcatcttctcctcctgttgtcttcctgtttactggcatgccctgcttgcacctcctccctggaattacacacactcctacttttatagaggtgaaatttggttgaaattagcatcacatacaactttgaagtgagcatagaacaattaagagtgataatgttggaactggttaggattaggggttgaagtgaagagaaggtgtctgaatgtgttaaaacaaacattaggattcctaatctatttttgaaaagcgtcatcggttgcttttctgactcatttcccagtccctcaccgtgagacaccccacaaatgtctgctgaggcagataccatcattacgttctaggaatgattctgcttgccttttgagagtcataatggcatagttcatttctaggataggagcagttttgtatacattataattcaggagtcagcaaactaaggcccgatgcctgttttggcaaataaaagtttcattaaaaaaagttttattggaacatagctgtgctcattctattttgtattgtctatggctacttttatgctacaacagcgtatttgagtacgtgcagccactatagatagtgtgagcctctagaaagcctgaaatatttatttttcggccctttaagaaaatgcatgttaacctcttagttaattaaaattaataataacaaacacatagtatgcactacgtgccagcttcttgtcatatgttaagtaaaaatattagttctaatactcttaataaccttataaggtagatattgttccaataccaatttaacatgtgaggaaactgagacataaagaggttaatcttccctgtcacaaagtgaagaaatacaagggctaggatttgaacaaaagtggcttgactccaagcctgggcttttaatagcttcttgtactgctgctccatttggagaaatagaggaaatacaaactattttaataaacagtgaaattataatatacaaccaaccagtttagtgaaaatcttggaaatatttaaattataagaaaggagataagatatatttaattaatttgagattaattattgcagtttttcaggctcatccatgaaagaattgtgagtagacaattcttttaatatttggttttattcactcttagtaaattgtctctttgaattaggcctgtatcttagtgtagtgattttataggatagtagactacagatccttttgtcagcttatttctccagtttttttttttttttttttggttcagtgtcatatccaaggaactgttccaccaaggaatcagaatcatttccaaatttttagtttcataactctgatttttctttaaacctgttttatattttctgcatcattgtaatagagaaatcagtcaacatttatttcagtaattgtttgcaactaaaacatgtgaaacaaaacaggctcaagagattctgacagcttgcttatttttcttgaaacttcagtttgtgtttttgacatacatatatcaatggtctcaaaaaagtttaaaaattaagaacatacagttttgtgtttgtcctcatgaagattacacttgtgaccccagtttagcatgaacaaatatttaagagtatgtcatagtaatgtttttgttaaaagactgtctttggactcaagccatatttttttttgttttttagggccatagtagacatttcttttaacatgggaagcatgattttgctcatcatgatacattgaatccaaatagcctgttcattgaatccaaatagccacaatggctacaaaaatgtgtgtattttattttactaggtatgtgtggaatatgtgaggaattaaaagggtagcttgtaaaaggcatcttgtcctgcaaagagagtatgtctggtcaggagtaacacagtaagtatacagattagtttaataaaacgtagagtaagattaatttaatgcaagcctttttttttttttttgagacggagttttgatcttgttgcccaggctagagtgcaatggcatgatcttggctcaccgcaacctctgcctcccaggttcaaacgattctcctgtctcagcctcccgagtagctgggattacaggcacgcaacaccacgcccgtctaattttgtgtttttagtagagacaggttttcaccatgttggccaggccagtctcgaactcctgacctcaagtgatccacccgccttggcctcccaaagtgctgggattgcaggcgtgagccaccacttctggccttgtaagacacttttataaacttctgataagcagcattctaatattgaaatacctgttcattatatcaattgataaaaagtattacaaatgtttccaacaaacactgctataggcctgtaaaggaagagatactctttaccagttcaccacggaagtgcttcacaataggtgtgagctgggttttgagtagacaggaaggatgagattacaatgaatactaaatatttctctggcacttgatgtttttcaaagcaatttcaaatatgtaatttgattttacagcaacttgatagaataagtagtaattgttattctcattttaaaaataatttgacatttagaagagttaaatgactttcttacacagctggtaagtggtggaggtgctacttatactccggtcttccaactccagatcatctaagttttgcattgtagcaccccttaaatagaaggatgggtcaggcacagtggctcatgcctgtcatcccagcactttgggaggccaaggcaggaggatcacttgagcccaggagttcaagaccagcctgggcaacatggcagaaaccccatctgtactaaaaattatccaggtgcggtgacatttgcctgtagtcccagctactcaggagactgaggtgagaggatcacctgagcctggaagtgaaaggctgtagtgagccatggttgtactgtactccagcagcctgggtgacagagtgagaccctgtctcaaaaaaaaaaaaaaaaaaagggaagcgtggaaaacactaaactaatagcagtctgcatggaattcaggtaaaggaggttggagatacagagtcagagagggactcaacttttagctttttaaatggctgagaaaatacctgtgatgggaaggggtaggtcaagcacagaggcaggagagactgtgagtaaacccttgcagtaatccaggccaggcatggttgtggcacaggccaaagtgttagttatggagggaagtatatggattctggatgtattttgaaggtagagccaactggatatgttgatgaactgattgtagggcttgaagaggaggaaacaagaatggctcatgcctgtaatcccagcactttaggaggccgaggcaggctgatcacttgaggtcaggagtttgagaccaacctggccaacatggtgaaaccccatctctactaagaatacaaaaattagccgggtgtgcctataatcccatctactcgggaggctgaggcaggacaaccacttgaacccagaaggcagaggtttcagtgagcagagatcgtgccactgcactccagtctgggtgacagagtaagactccgtctcaaaaaaaaagaaaaaagaaaagaacggctccaaagtttaaaacttgagcaactggaagtataaaattatggttgaatgagatgggaaacaactaagaaatgaggaggccagggttgacttagacctgtagagttgagatgccaattaaacattcaaacggtaagttcaagtaggcaagtggacacagatttaaagttcagaggagagtcatgaatttagaagccgtcagaatgcaggtgatgtttgtagtggtaagattaggtggcatcactaggggaatgattgtagataaagaaaagagttccaaggacttaggtctgggacatttcagcgttttgagttcttggagatgaggaggaaccagtaaggagcccgatacttatgcagttgctttagaatgagctgaagtgaggccactgaatgtgggaaaagctataagggtttgttgaaacataacttcaaagcaacctagtgagttttgtctgtagaccatgctgtgggcctcatggtatgataggcattgaattgttcaagaaaagtccataataaaacactatagtgatcaaacatttttatttatgggattaagccgttacttagttctcataacagcagagtgagaagtaagtaacagggatcattaccctcatttttaacataaagaaactgagactagaggtgagagggttacatgtagttttgcaagtaatagtagcacagtttttttccccaaatacctactgacaaagatctttataaatttctagaatgatatattttataagcaggaaacagaggccagaagaaactagagaaaaggagctgccattaaggaaaataagagaacacttggaacccaaacagaagcatgatctacaaggacaggaggaatcacgctgtggtgaaaagcactagctgagaatcaggaaacttggataccagtcctggctgtttcactttcggaaagcctggaagccagtttcttaaggcttagtgtgtttctgagaacatgactttcttacaggatggatttgtaagctcattaaaaaggcctgggaggatgcctagatacaggagtaacttcttgggagcagatgagcttagagggggcaacaaatggagggttttttactttcctcttcattattatttgaattattaataatgtgtatgtgctacatttttttagtttcatcaaaaattgaaaatgggaaaaactgtaagacagaattcaattaagcaatttctagacaccagtagaaaaatgtggctcatatccattgattcctaaatcttaatttcttctgctataaaattagggaattttcaagagtccctaaaaccaattccatctctggcatcttgtcatcctatgtagagccacacatttcaagatgtggggcccttttgtaactagtgtatagaagacaatctttgcactgatgttttcatgaaaatcagttaactgaaatgctctgataacactataaggctaaaactggaatttgcaccagtactaagtaatttaataaaacaatgcattatgtcaaataactacgcccatcacttgaattagttaatgttgttatagcccattatccaattttacacatgagaacactggggcttatcaagattaagtaacatgcccatgattatatagctgccaagtgatgaaacccaagcctgagtactatgcctaaaatctttgtttgttgatagacacataatattggtacatatttgtggggtacatgtgatattttgttacatgaatagaatgtgtaatgatcaagttggggcatttaggatatccatcactttgagcatttatcatttctatgtgtggagagcatttcaagtcctcatttctagctattttgagatatataatgtgttattattatctatagtcaccctactctactatcaaacactagaacttattccttctatctaactgtgttttgttgcccattaaccaatctctattcatccctctcacacccacgttcttcccagtctctgataattattattctactctctacctccataagatcaacttttttttagctcccgcatgtgagtgagtacatgcaatatttgtctttctgggctggacttattacacttaacataatgatctccagttccatccatgttgctgcaaatgatgtgatttcattcttttttatggctgaatagtatttcatcgtgtatatataccacattttccttatccattcatgcattaaggaacacttaggttgattcatatctttgatgatgagaatagtctaagcctaaaatcgtaatcactaaatacatctgctgtctcagtctttttggtggtaaacgacttccttgatataggaaagcagtgatttattttggtttacaaagagagaaaccagaatctgcttgatttttgtcaagtgccctcatttctgaaccccctttttttaattttcaagttaacttttttagttaactaagtaaactgctcaatgttcttcctgtgtctcgtattgatataaccctaccttcatgtatttcattcataaaatgcattgccccagcttgaatgtttctgaaacccaaatgtcttgtaattaatgggtctgtttaatgtgacagtatttcttcgtgctacaggaaaaattaagtcaatggtgtttttttgttttgttttgtttcgttttttgagacagagtctcgctctgtcgcctaggctggagtgcagtggcatgatcttggctcactgcaagctctgcctcccgggttcacgccattctcctgcctcagcctcccgagtagctgggactacaggcacccgccaccatgcccggctaattttttgtatttttagtagagacgaggtttcaccatgttagccaggatggtctcgatctcctgacctcatgatctgtctgcctcggcctcccaaagtaatggtgttcttaaacatggtgttgtccctggagccagaaaataagacaatagtctttctgttggaagcactgttgccttgttcaacaatctagggacccatacacctagtttcctgactgcgttcctggtcttaacacactgtgttattcagatgtccagcttgagtgtctgacttccacttctgtcttcattgtcagccacggagccctctcagatctgatccactcctttgttgcttcctacttttcattctaaaacttgatttggtttgcttacggttctggtttcctactcagtgtccgtgacccatgtgaacagctctcaaacctgccagagtattagaagcacctggagaaatttcttaaaattaaagactctaaagtacacatcagaagtgcaaaaccagttgcttggattggaatctggaaatctacattgaaaagagcgctttcaggcacagcctgattagaatccctgcccatgtgatagctttactggaagcaggttgccaagtcgatttcctcctcgttccatagttgttcaatagaatgtgagaagttagggactccggtatcgttctgtcagggtatcttgattaggaacttttttattgagagataattataacaagactgcattctattcccttaaaaaaagtatctgtttatacttactgttgtgtaaacacatcatagaaaattacatttgaaattacatttcccatagaggtgcttatcttaccatagaaagaaaaaaaaaaagcttttggattgagctgttttctttttctcatttttcttctttaatcaaatataaaataccttaattatgcattggagttcaccagcaaatatttgaaaaaatcatcaccatgccacatgaactatgaagcaattacgtgtttattccaagcagtttttgaaataagagatttcggccaatttcccaatggatacttttcttatttaaataacaagtccagatcattgacttaaaaaaacaccaacaaaactcccttagtacatgatagtttgttataattaaagtcttctgtgaaaatgaaattatttatgcttattaactcaatgaatctttaatacatgtctctgaaattctaagaatctcaataggttctggaaacatagtttatatccttatgttgctgaatgttgtctgattttattgtgagagaaggccttctcagagctgagtgtttttgtttggtatctcatactgtttctcagagacagcatatatatgttagtttttgaaatacggtttaattagaaagaactcttaaaccaaatcaatgatatgtagcttactcacttgagaaattcagggcaaagctgatcctttttaggtatgaaggtctagttgaaaatatgtaagtgctgtgttgcaaaacagaatcctatatcactgagcctttccattctgcatattgcccttaatttgctgttatacaatttaacagctgtctcttaatagccatttaaactgagatactatgtaagacagttatattttagtttataattatttatagcatccactggggaagtttaggtactacaagaaggcagtgtaggctgggcaccgtggttcacacctgtaatcccagcactttgggaggctaacacaggtggactgcttgagatcaggggctcgcaaccagccttggcaacatggtgcaaccctatctctacaaaaaatacaaaaaatgaccagagtgtgggtggtgtgtacctgtagtcctagctacccaggaggctgagttgagagaatctcttgagctggagaggtctaggttgtagtgagccatgatggcacctgcactccagcctggatgcctgggtgacagagtgagaccttgtctccaaaaaaaaaaagagaaagcaatgtagtaagtctctagaatcctctcattctttgccttctttggttgcttctagcaccatcaagaaatgatgtttaaactcttttcaggaacgcttacctatttttcacaatcattaccttcattagatagcatttcctgtttggctttttctctattagcgtgtgaaaaatattcttatggtttatttatccatcgctaccccagaaaacaatagtccctactaaaaatgttatatttatatagatataaagaagtcttgaacttactcatgctatttttttccccagaatttgttttctaaataaacattaataacttcttgattctatgaactgcaatttgtctgtcaggaaagttatgtagaggcatgatgtttaagctagttcagtgttacctgaaagactgaatgattcttcagatggacagagattgcacccagacagcaagcatggatattgacaatgtccttgtgaagaactgtgacatttaacttgttaggctgccacaatttcatagatgctcacagtagctctttcttcacagataaagacttttattatgtctagcatagcaaacggtatggaattcatttctgtgatgagttcctcttgcaccctaagtcccttgggggtgacatggagtgcgaaggtggatactgtgaatgcagaggacccttgtcacaactgaggaccctgaacttagggaactcttttataataggctggaagcaaacctgtccaagattttccccagagagagatgttatactgatcagcaaacaaatctgccctctgctgtatctggctagtttgtctttatacgaaaatgtttaaaaatataatctagaacaaaggacatcagatcggtacttctactgacaagatgtgcagaaacccaagagatccatggagaattgtctgccaacagtcctgagcaatgaatatgctcatggttcaaactcttcccaccagaattgtctccccactctactaattctaatttatttgagttacccgtggagtgggtctttttatattacctttatcataggcattattgatgatcaatagactggctaagacataaataacaagaagtacagaggagagctcatcattgatttggccccatttcatacatatgtactataagtaatattgacctttttgaagttctagaaaattcattaaatactaatagctcaaactggaattctttttaaggaagatagtctgggaaaaaaaagaaagttttgtgttggagaaacaagaatcggctatttaaaaagatctatataaatactgagaacaggattaagtcttcctgcagtctgagtcaaatctgtggttagggctgaatgtttatgacgattgagtgatctgatgaattacaggtttatagctttcttttctaggtacttaattgtctgcaggaagctggcttttttgaagtgaattttgtgttcactgttcatatgattgaagttattaatgccaaggattatttagtcacccctccctcagtgttaccaaccagaaaactgaggcccaagtcggctgggagagttgcctaaagttacatgtgagggaggagcagggctagcctctcacatttccctggaggggctttgtttattcaaagggtacagcttatgttaaggtcagagagacagagggagcgtgcatgctcccaagactgattgatctcagcaggaattgtaattcctctatgtatagaaaactccactcttcactgtaaataccaacccatagtagtattgtatttggtaactggccataatgtatgaaagctcattccagtttgtgactagagcttggccctagtatagaaaaatattaattaccattcaaaatcacttaaaaaaagatgactatccaaaatgcaaacccggggttgccttaggcataataaacaaataattaaaccaattataacttaccagtgaaacttgcaagctttgagaagttggccttgtttcatgtttggtgaaaggcagagtggtttaattactttcgtctgtggacagaggcatttccatagagagctggaagggatctttgagagcaaatgatcagatgattttcacccgtttgaagaactgcgagctcttggaaccccagagatagggtagagggacccactgagggtgaagatcttcactcttacttatttcttataaagccattttgcttatacctgttttgtatcttgatctctgttacttagaaaacatattttaaaacacactaatacagtattttatattttgacaggcgttgggtgcatgcatttattaaaactaattgagtgcacacttaagatttgtaaattttatgtaaaaagacgaaaaagttactgaactcaattatggcatgctgaaatatttagggggaggtgtacatcagcgtctgtgaattactttgaagtgaaccagaagtaaggtgcattgatgggtggatataaggtggatacccaataaagcaagtatagtaacatagtaatggtagaaggtagataaaggatatatgtaggggtgcttattgtatgattctttcaactttgctgcatgattgaaaactttcttaaaatattatatgggaaaaaactcaccaatatagtttagccctctcatttttgtaaataaggaaagtgatgctcagggagaatatgatcaaatcattggcagaataagatctagtaccaaaaaatcttcagagaactggttctgctgcctgtctatacattccgattttagcatttgcccaagaatttttgcatgaatgccagaaaaatcatgtatttttgatgaaataatagtattattaatgatgaaaaaaggcattttgcaggattattggaactcttactttcatgatgctatcttctcatgcccatttgttaatttttattctggtaacattgaggcaatttttgtgctgcttgtagtttaatacattagagtttattgtgaatttctatattatgtagtatttacggcttaaattttccttgttttcaattcacaagtacctaaatgcatgatattttatgatgaatatcttcctttgaaagttcagaaatgaaggtaacatcttagaaaaggtccgtgaacgttctatagattattttgatgtcttttctgaaattgaaaaaaaaatcgccttgcttctagtgtttgactagcatgtcatggtaaaggacaacctaaaagtgatttctccattactcttgtactgttctagaacacttacagggtaagaatctctggagtcaagtctgccttaggtttgaattctggttatggtatttccagatgtgagaacatggggaagttactaaacttctttgagcctttttttccttgggtataaaatgggaataatactagtatcctatggctcttagtatttaataggtatcaggtgtaacttttattagtagtaaacgtagactttgctagtgaatgatatatctttgttgtattatatttgtacttataacatctatttatatattatcttatttttatttattgttgatattcatctctacatgggattgtgcttctgcatatttacaggatttacatcttgcctgtgcagtgtttgctcttacagttgtttaccccaaagcatgagtcatctacaaagcacattttagttaagattgggcatatttatttctcaattctgttttcctttaaatgactcttttggccttcttaaattttggcattgattactgcttttcagtttcctccctagaatccaaaatgtaagaattatagaattgtagccttgcataactcaaaatgtgagaaatgtataaggccgaattagtaactaattaaattttttatcattagcgtaactttaaaaaattgcagtgcaaagatgctactatttcttattaagttgataaaaaatattggtgttatttgaagatgtaattttagacaaatggaaattttagttggaagattattagatacgtatcttaccccccacagcatacatatacacatgcataagaagatagtatagtaagtaatgtacatgtaagataatagtataccatttgaaggaaaaattgtcaaggttatatttattacagttcaatcgttgtgtaattttttttggtccatcatttgaaatcctttttttaaaataatgtgatacttcttagatttaagggtgacagaatgagcttaaggtacagcatcatagaatttggaggcacacagtcatagaacacttacaggctaagaatctctggagtcaaggaagatgctttgagctcatttggaatttcagatttgtggtttttaacacttgctgcacgttaaaattatttgggggagtcttaaaaatactaatatttaggttgtatcccagatgcatgaaattagaatctctgtgaggggtcctgaatattcctagtttttaaaagctcacctggtgatcctacaatgatatcaattataaaaaacattttctgggttttttttttcttttccactgtttcaagaggaaacagatcactgctgtaaatcttggtaaagtcatagagctatttatctttagaattgaaatagcatcttggtctcctcttacacggtggtttctcccctctcccacgatgctatcattttcatttcctctagtttgtgttttttattttgagtttgtgagggtccccaaaaccactggggtaggagctacacctgtagctaggcctggttttggtggatgaccccagatgaatcacccatttggatttcctgaaacactggagagtaaatgaagaccctggcgtagctccagtgtacctcaactggactagtcaaactgctctgtaaatagagttcttctgtggtcaggagaaaaccctgtggcatttctagttggttactctaaatcttatggactatgtattaattatattgtactttattcagtaataatggaatatatgtgtaatagaatagttttagtttcaggcatatattaggttttttgaaaagatggaagaataggccaggcacagtggctcacacctgtagtcccagcagtttggaagaccaagggaggaggatcactggagcccaggagtttgaggctagcctgggcaacatagggagaccccacctctacaaaaataataaaaaattagccagctgtgttggtgtgcacctgtagtcccaactacttgggaggctgaagcaggaggatcacttcagcctgggaggtcaaagctgcagtaagtggtgatcacaccactgcactccagcctgggtgacagaatgagaccctgcttcaaaaaaaaaaaaaaaaaagaataaacaaaaatcaatattactttgtcattggaacttaataacttaattaaaataattttacctattttatgatattattacaattttgttgttatttatagacaatataattcatatagtatatatataattaactgactttctgtgtattccataattatttggaatatggagttgtaatattatcacgccatcaaggctaacctccaaatgaatggcaatatggagaaatgtgtttgtaactcacttatgatacattctttggataaatacagcttattctaggctttcatccccatttcttgctgtggcgggataatgttgtagtctgaaatggcatgtggccagacgtggatgcagtattagtgcctcttgcaggccttgtttaaaacactcactctgggatactactgtgcttctttacttccagactgaccactgctctaagcagtgttggggcaatgcctgggctgcccgagcccttgaagttcaagaagaagcacctggacttctcatgaggggaggtcagagtcaatgtaagtgacttcctaatttggggggctaaatcccttcagtgattgaggtctgtatgaagtcagccatataaatagctatttccaatgtgttttatgtcagcatcataccccaaaatactgccattgacctaaaataaaactttagaagtgtttctcaagtaataaatgccatgcgtctcctgtgaaaatcatcatttccctgagttatccattgatattttcaattccatgaaaatactactttgaggacattggagttgctttgcacgttggcatcaattaagagaaaacttagaaagtctaatttaaaaattacttggactttatagctaagtagagagctttatttgtcaggcagaaatgcatatgtgggcaaaggtgaaacatttataactttgagaatagttttaattttgctagagttagagaattgttgttgagcattgttggttaatacagctttatatcatttcaatgatgttgcttcaggaactcccaatcatgtaataattctcaaaagtaacagttcagtaaattgtatcagaaaatacttgccatgtacacaaatggacaatagaaatggtagaaataatgtttatttgtgagaaattgtaggggaatagaattaggtttctcctataaggcaacctaatttgatgcttgtattaagatggaattttcattaaaaaccgagataggtgagaaagtgatgaaagaatagaaaatattacaatcccattttcattcttatcaaatcctgaggatctaaatatcttttcaaatattctttttgtttataagttatatggtaatggtgtttggagatcatgtgaggatcatttatctagtacagttcaactttagaacattttgcataaaattataataatttgaataggagggaaagcaaaggtctacaataagtaaaggttcaaattagcttatttttttcctttgtcatggcttagatccaacttagataaatttgagcaatgaatattatacaaacaaatgttttacaaatagtactttccttaattgagtctatcctgtaacacattaaaatcacatgcattgggaagagcgtggaacatgcagttcaaaagcttcaggtatactctaagttcagacacccctttttactacagtgtcatttatgttctctcagcatcagacctgataacctgtcctgcctaccctcctgggttgttatggggcccaaatgagatgacatatggcatatgcgaaagtgccttgctaagtataacaagctaaataaaatttgttattcttttggatgcagcatttagaacaaaacttttataaaaatcaggatattttatccaacaaccttagagatggttgtcttttttatacgtgtattttggttaaagcaagaaacaaagtaattaatatagagtaggctaaaatgcatggcataacaacatcaaaatgcaaaatagcttcagttaccatggcatattctggaatcaaactgtttttattagttccccgtctccctttctttaacttctcctccttccttctctttctttcttaacactgtttcttccaaattgaaacgtcttttctgtttatctcctgaccataagctttataccccggggacccttctttcaaagtgttatatcacttagttattctggcagattttgtataaggcatttttgacacccttcccttgatgtcttatagttagacaaggtgacgttctaagccactggaccagaaacaggaaaagcagtgtttggtccccaaggagtgataaaactacaggtagtgttggcaggtgtgtatagtcacacttcagctgagactgttctgtggtttgaaactctttagctgtatctgtcataccacttacagttttttttaaaaaaaagtttaaacattgcatcactgcatgtttagaataaagtaactcagagcagaaacgtagaaaagtaatgcatacaaaggaaagtaaacagagcatgagaagaaatacagagaaacctgaattatataatgaaaatggcaaagataaattttaggttgggagatgaggagaagacttggatgagagagaaagaaaagaaaactgattttaccaggattgctctagcttttcagggcttatttcagaaaagctgactagggctctggaacccagggaatcagtgctccccagttgacctatgccaagaacactgggaagggagaaaaagccagaagtgaatgggtaacagaaggtaaggactcatttattctggccttcatagtttaaacaacataaacttaagaggagtatttgttttgaaactattgaaacttattagcatcaaatacttgctatgattctttgttattggttggttgtttttgaaacctctggttgaaagagtggtttagaaagctcaatatttccgtagctatggtttgccatcctgttattaccctaaggcagaaaattggggttgcttcttctctattattcttcttccttcgtttctttaatataatcatcccttttcttccctgcctttcttcccatgtctctttgttcttcctttgcttacttgttttctgttcccctactccaaaattttagaatgatttattcagacttacaagtcattacatgacactgtaaaatctcagaaatatttttcttcaggcatatcaataataagtaatatcaactcaaagaagattaatgtgccactttgaattctcaaattttctctactgtgaaaagagactagtatttgagaaaaacatacaagttaaaaccagaatattcagaaatttgggctatttttgagcattagcttatgcttctcagaatttatatgtatgtaaacactggaaattttggactatgatatttagatagagcctaatcttactgagggttactatctggtagccagcacaggatttgtgaaaatcagtctctgattccttgagatttctttgtttacctggtttctgcatttgagtggttattgagctgctgtagtgtacttctgtctctcaagtagggatatcattagctggcttgtacttgtcttggaaacattacaaaaaaagtgccccttctgagccaaagaattataaaccacttttcagtttggcttggcattgaaattgggctgagtttaggcccctcatgccacccaggaacttctgcacataaataaacagtacaatcatatgcagtaatccctagggaaaatgtgattttttttctctaaaaatgatggtgctttataaatcatcaagtcttcaaaccacagcaaaatttttttcagtcttagtcaataatcagacattgctgacttttgtaagtaagagattatcaacattttatctgtcaaatatttaaatatttgacaaatcaaatattcaaagctttaaataaagtaatattgtagtaatatgatataaataggaaagtgcatcggaaatataggtatacctttttttttttttttttttttttttgagacagagtcttgctctgtcgcccaggctgaagtgcagtggtacgatctcggctcactgcaagctccgcctcccgggttcacgccattctcctgcctcagcctcctgtcctgagtagctgggactacaggcacccaccaccacgctccactaattttttttgtatttttagtagagacggggtttcaccgtattagtgaggatggtctcgatttcctgaccttgtgatccgccagccttggcttcccaaagtgctaggattacaggcgtgagccactgcacctggctggtatacctggttttattgcactttgctttatgatgcttcacagatactgcatttttttaacacaatttaatgtttgtggcaaccctgtgccaatgccatttttctaacaatatgagctcgcttcatgtctctgtgtcacattttggtaattctcacaatatttcagactttttcatcattattatatctgttatggtgatctgggattgatgatctttgatgctattcttggaattgttttggagcaccatgaaccatgcccatataagacagagaactttatcaatgttgtgtgtgtcttctgactgttccacttaccaaccattttccagtatctctccatttccttggttctttctattccatgagacacaacagtattgaaattaggccagttaataaccctacagtggcctctatattttcaagtgaaaacaagagtctcacatctctcactttaaatcaaaagctagaaatgataaagctgactgaggatagtatgtccaaagccgagataggccaagagcgaggcttcttgggccacagagttacccaagttttgaatgcaaaggaaaagtgcttgaaggacattaaaagtgctactctggtgaacacatgaatgataagaaagcaaaacagcttatttctgatatggagaaaatttaagtggtctggatagatcagtcaaccacaacattcgcttaagccaaagcctaatccagaacaaggctctaactctattcaaggctatgaaggctgagtgaggtgaggaagctgcagaggaaatgttggaggctagcagaggttagctcagaaggattaaggaaagaagccttctccataacctaaaagtgcaaggtgaagcagaaagtgcttttgtagacgctgcagcaagttattcagaaaatctagctaagatcattgatggaggtggccacactaagcaacatattttcaatgtagatggagcacccttctattggaagaagatgccatctaggactttcatagttagagaggagaagtcaatgcatgacttcgaagcttcaaaggacaggctgactcttttgttaggaactaaggcagctaatgactttaagttaaagccaacgcttatttaccattctgaaaattctaaggcccttaggaattatactaaatctactctgcctgtgttctgtatatggaacaacaaaccctgtaatacagaacacctgtttacagcatggtttattgaatatttaagtccactgtggagacttactgctccaaaaaaaagattcttttcaaaatatgactgctcattggcaatgtagcttgtcactcaagagttccaaaagaaatgtccatggagattaatgttgttttcacactgctaacacaacatccattctatatctcacagaggagcaattttggctttcaagtgttattggttaagaaatacattttgtatggctatggttgccataaatagtgattcctctgatggatttgggtctgagcaaagtaaatcgtaaaccttctgaaaagaattcaccattccagatgccattatgaacaatgagattcatgggatgagatcaaaatatcaacattaacaggatttggaagaagttgattccaactcatatgaattactgtgaggggttcaggatttttagtggaggaagtaattgcagatgtgatggaaatagttagagaactagaattagaagtaaaacctgaagatgtgactgatttgctgcaatcccatgataaaacttgagtggataaagaattgtttcttatggatgagcaaagaaaggggtttcttgagatagaatataccccaggtgaagatgctttgagcattgttgacatgacaacaaaaaatttagaatattacataaacttacttggtaaagcagtggcagagtttgagaagactgacttcaagtttcaaagaagttctattgtaggtaaaatgctaccaaacagaatagcatgatacagagaaattccttgtgaaagagtcaattgatgtgacaaattccatgtcttattttaggaaattgtcacaactaccccaaccttcagcaaccaccaccttgattagtcagcagctatgaacactgatgcaggaccctccatcagcaaaaagattactatttactgaaggctcaaatgactgttagccatttttagcaataaagtaattttaggttaaggcatatacttttttttagagataattctattgcacacttaatagactacagcgtagtataaatataacttttgtatgcactgggaaacaaaaaggtttgtgtgactcactttattgtgacattcactttattgtggtagtctggaatcaaacctgcaatatctccaaggtatgcctgtataagaattgtttctatggtatttaatgagatttggggctaggaaagcaatttgatttaaatgaaagattgaaatttcaggaagtatatattgaaatagaagtactataccagataatgtttctgtccatctatctattttttgacacattcatacagctttaagacaatacagagaaggtagaaactaggatggggaagatttctggttaaaaacttcacacttgaagtcatgatacttaaatgcattttaaacacgcgagtgacttaaaatttgcacgagaactggaatttggatatagtatgattttcagtttgttcttatctctggtagaagttcttatcttgtggggacaggaattccacagaggaaggtgatgcggataggaaatgggatactactctgtctcaggaagcagaaggcagaggggggagtcctctgtcttaagtacattttgggtctaatttgcacaatctggtgatagaatcactcgagttccatgtatccctgctgctgtcttggacatcaaagctggcattagtgccaggtatcgtgtttattgatatttaagccagagtggacagttgctacccagtggtgccgtaccaaagtcaggagctagaagccagactccaagaattcccagccagctagctttactggcaactctgtcgtttcattaactttgcagtaatggaagttcctggtttgtgcagttcaacaacggtggttttggactgtatctacttgtaatgatgaagttttattgcactagatggataaaatatactaggttaatgttactccttttttcaaaaaacagtctcagtttctttttcaaaaataaaaagtactagctctggccattgactatttatgtttgttcctacagtcctgaaatgtgaatttgatgttatgctgcatatttagaaactagagtagaactctgcaaactatgaagcaactttaagggttaaagagaggaaatcccaaattcctaaaatgcacaagtatgtataaaaatctcaattagaaagctttatataccataaaacaatagatagtttttggaagatatatactaaaagcaaatgaaggacattcaatcactctcttagtaattttatttccgtaggcgatgttgtgtagtaatactgaattgctggttcttatgcttaatactgagcaaggaactttaagtttaaagtcaagctaaagtaaaaattattaagattatcttaagaacttgttaaatgtgtttaaattttttatgaactggaagttttagttagtttttttccctttagctgttgcattagcagccatagaccaagtgacaacatcgttgtttttaataaaacggattaataaaaatgtaagaggattaagcatttcaggttctggcttctatgcttaatatgagagtattggtttgaagccagtgtgccatacatgctaattgattgctactttgcttgaagtaatgtagaagattatctcctgtaagattgttcatctagggcggttattcccaaccaggagcaattttgcctccaggggacataaagcaatgtctggagacatttttgattgtcacatttgggggtggagtgtgttgatactggcatctagggagtagaggctggagatgtggctaaataacccacaatgcaaaggaaagccctccacgacaaagaaatatcttgtccaaaattacagtagggctgaggttgagacctctttgttctaggaatatttccagtttggtttcttctttatctccttttcctttccttcctttcctttctttctttttcccttcctcttagttaaataggtatgtgtcacttggtatggagatgagtaagcgtctctctgttttacgctaaatgtaagcttttcagagtgatttctcagggtgtggttttgtacagagtggaaagggagtcgaaagccatgcattgtaactgtataaccttgggcatgtcacttatgctttcaattctttgtttctaaaaatcagaattaaatgagatctaagatttcttttagagcaacaaattcaaactaacttggtgaaatcattgactcaaccggacttgagcacccattttgtcaaacaatgtgctctaagattcatatgatacagaagacatagttcctgatgtctaaacgcctgaatctagttggggagacggcaggcatgtaaacagaaataaccatacactgttataatagttctaatgaaagttctacagtagaacagggtaggaaagccactctctataggagagttgggtaagtcctctgagagaggatggaatttgaattggctattgaaggagagtagggatttgccaggagaaaaggaggaagagcatttcaggcaaaaggaacagcaaaagctaaagcttagaattacaaaaagccctgggatgttctggaatgttgaaagcttctgtctgtctcgaacatgcagatcactgaataaaaatattctttttgtattgctttaacatatcaaaaatttccaaaacaatctaaaaccaggaaaaataaatattcccatctagccattgctgttggactttagctgttcactcctctagagtgtgtgcatcacaagcacacacagcctcatttacagtcccaagattccttcggacttcattctcctactttgcttgtcttaacttgcgcctcattgtttatactgggacttgtgatgcagacaagttcaagtacaacaaatccaattttttaaaaagtgtctgattttttttcctcatcaaattctcttgaagtacttttgaattttaatagcccccttggggcagtggatttgggtaattaaaaatgctgatttaattcacaaactcaggagaagcaagtgtcggaccatcccattgagcccttctacaccacgtggagaagttgacggcagaaatagtgccaagacttctggcctggcacaatctgatgacaggcagcactaatttttggcttcgggcaatcaaatgctgctcagcattgtttaacaaggggttcttagtgtgaactaagccaccaacacgattttctttggtagccgtgaaagtcagcttagagaatgtcacaaaaggaaactgtgtattctgagggaaactcatctttctattgtttaaagaagtagagggaggccaaggtgggcggatcacgaggtcaagagatcaagaccatcctggccaccatgatgaaacctcgtctttactgaaaatacaaagaaagtagccgggtgtggtggcacatgcctgtaatcccagctactcaagaggctgaggcaggagaaccgcttgaccccaggaggcagaggttgcagtgagccaagatcgtgccactgcactccagcctggtgacaaagcaagactccatctcaaaaaaaaaaaaaaagtagataaattttacttgagtttttcctcagcaaatctgacttttctcaggagaagggagtttaagtggaatagctctgttggtttcctttagaaatatccagatataaaaagaagttttgtagtagatatcactgtgacttaaagaaagttcaggaaatctgacttctatttctagcctagcagataactttttgtgacacattattccttgatgtctgagattctttctagaaatcaatctaataatacctgctgttcgttgctcaggacttctgaagtaatgtctgcagactatgtgagaagaaaaaggttctatcacacaaagtatttttccactcttgatatcagctcattccttgtttatatgattaagtttgaagtagtctgacatttggcaaactctttttttttcccaccagaaactaaaattcatgattaactcactgctcgctatgaatttgtcacaacttcacttaacctaataaatatcccagaaagagcagacttggctggagttgaatcagtacagctttactgatttggccactaagttaagcccatactttttaatctggattgagctaagggggaatgttcagaaatcaaggtctgggtgcattctcccagaaatcactggagctcagctggctttattagcctggtgagaggagggggaggtataaataaatgcatagcagacaccactttttcctctggtatgtgtatagacctttggcggtagtagtagaggggttataataaacaattaatggatgatcaatcttaagtatgatataggagaatttaaagtattctgagttcttaaagactattcactatataatatgtgataacttatattcttttattctgttagattttgctttctaaatgaataatcatatactgcatgttttagagcagggatagctaaaattttactgaaacacagtaaaatttactgtgcttttgtgccacaaaggcagagtgaagtacctccaacagaggatttatggtccacaaagactacaataaaatatgtactatctggctctttacagagaaagtttactgactcctgcattaactaaacaccttttaaaacaaaaatgaatttctgcaattgagatcagttctctcagggtcattattcacctagacaaatgaaattcttcttttgaaaaagtgataacaaatacgtttttctcatcatatttgctttataatacttgagaaattcttttaaaatgcaattgtttaaataatgtcaaaagaaacacttcttgtaatttataagcactccagaaaaaaacatatgcatatatgtagtatagtgactgtaaagtgatcttgaatagtatgttattggttgtgttagggaaatgaataaataacaataacaatagcaaatgcttctaaagtgctccttgggtgtcaagcactgttctaagtaattttacatttcttttttcagcaaccatttaaagtaggataattgttacctctctttcatagattatgtgttttgttgttgtaaataaagttgaagaataggtaagaaaaacaacttataaaatatcatttgtaatttatttcataggtttatggacacaacaataattatatttattgagatcataaagccaaggcattcgactatattccataattaaagcattaaaaatgatagagaatagttttaatagcataggagagttatcttgaataggaatttgatagttttcagttctgagcttaatttaattttctcaagcttcttctatgcctaatttaactttatacagttaggtttcttttgggtttacttttctcatcctttaaagttaaaaacattcagctgtgattagaaattgcagtgattggccaggcgtggtcattcacacctgtaatcccagcactttgggaggccaaggcgggcggatcacgaggtcaggagattgagacctcctggccaacacggtgaaaccccgtctctactaaaaatacaaaaaaaattagccgggtgtggtggtgggcacctgtagtcccagctacttgggaggctgaggcaggagagtggcgtgaaccagggaggtggagcttgcagtgagctgagattgcaccactgcactccagcctgggcgacagagtaagactctgtctcaaaagaaaaaaaaaagaaattgcaatgattaacttcagatactgcacggggtagttctccattgagcagctcatttcacgataccacacttgcactaagagaaagtgccctgaggcaaagacaaattcttagcaggtggcttgataattgataagcagatgtatggcatttagtagtaaagtagaagctatgctaagttgattagcaaggaggtcaggcgagtgactcagaatttggttgtgagtagaagccctagtggggactttcctttgctggaaagccaggtgatggttggacaagtaggtgataagcagatgtttgcagttccgtatgtcacaccacttcttcgcctactctggaatttgtcttgagaaagcacaaaggatacaataaaaagaggtgagaagcaaaggtaagaaacaccaccagagacattcaaaatcagaaggtctcctagttaggcagtccacacttacgagattcaccctattctgcttttatgaacccaagcactgctgtttcagctatttgacatgtattatatgcttttaactctgaaaacgctgtgtgacttgttccacatagcaccatctcttccaggttgtttctttatactgagcgtttctcagttgattaaaaaatgttgtgtgaacaggaagtatttctaatagaaagtattcctcattcctgattaataccatttttgcaaagttctaccactgtaactgtttacatcaaggcaaaaggcaggctagtgaataaggatgacttataaatccttcagactgggaatgcctatcagcatctgcagtaactgtgcgtaactgaggatggagctcagtcatggggctagaaatgaagacagaatgggaagttagtactgcttttaactggacgttctgatatttaagcttcagattttcttctttttttttttagagtttgtttgtaatctgttgttattgaagagatttggaatttcttgtcagaaaagtgtttaaaacatcacttaaagtcagttgcattccttgtttgcttgactctgcaaaaaaggccttctattttatatgcattgatttgaccatttaaacttcctccgagacaataaacttgctgaactgtggaataaattgtgatattgaattgttcaatgtatggaaaagagctgttaaagctgcagtgtaaattccagttggatataataccactctcatcaactatacataagacacttatgttaccggggtacatttacagcttccgattagaaagttaaaacatctttaagtatatgaactttctcaaaatattcttgcatgagacatcacaattttatactgtactatatgtgcaaaaccaatactctagcctatcacatgtatttttcaagcctactttgtttgctgctggtggtgttgattgcagtaatgggtacttaaagcatcaagttatctctgcctcattctgcataattgttcagtggattcacttccctgtcagatcaatctccccccatacactccctgagatgttatctgggtacatagagcccagtgttgtcctgtgacatcatggtcttgtggggagaggacgcctcagatctgagtgttgttccccaggttctctctggcctcccctgggaggcaatgattccggtgttgtgcccgtacagttcactatggaaatcagggatgatgggtgtgtgtctcagctgaggcagactgcacagaccgtcatcatcatggcgcatctcgaggtctgcagtccattccatcctggcagcctgtccatcagctattaatttcagaaccactttgactctgttgcagtgaccatccttggaaattttatccagccatatcaggtaccttctgcctcttgcacaggacttagagaagtatcccaaatgtcatctttgcccatgggaattgaggagggcctgggagtgctagcgtggatggcttcttacctagaatagcagccctgtctttttattctgacaggaccacaccacctcagagcaggtccgctccacagacacttccctcccagattttcaagcactctccacttctgcttttcttccagtatgtccgagcagctcccctccactgcaaccttcaccatttcaacacttgatgtgggagctgggacacatttgaatgagtcctctgctgctcctcttatccctcaaattgttatgaactccttttagttctcctttctgttttactggaaattcctctgtgtctcatccaccttccactggtgacgttcatcctctctttcttttttttgagatggagttttgctcttattgcccaggctggagtgcaatgtcacgatcttggctcactgcaacctctgcctcccaggttcaagtgattctcctgcctcagcctcccgagtagctgggattacaggtgcctgccaccacgcccagctaattttttgctttttttttttttttttttttagtagggacggggtttcaccatgttggccaggttggtcttgaactcctgacctcaggtgatccacccgcctcagcctcccaaagtgctgggattacgggcatgagccaccatgcttggcctcattctccatttctaagtgcacaatgcctgctgggaaacactttttatgacataaaaaataaaaaaatacaatgatgtttttaaatattaatctcttgcctttcatatgtgacttaaactgactacatttatcctgacaactagaagttggaagatgaggcctctgtgtcaagtggtgataaaataccttgtaaagatggcagaaagtggtgtttacaaatcagacacaagacctgacatccccctttagggaagtgtcccagtgtgctgatggcactgaggaagagattcacttaaagagaaaagggcagaggtaaaggaacagattttcttcttattctgtaccacgttctttctttaacacctgggttgatttgattccaacagactccctggatcacctgtaacccatctcctggtggcctttgtggctccttagtggctccaggaaactgatacattttaacatgtttgtcacaatggccgtaggattccataataaaaagataactgtactatttcttactgattaaaaacacctgtaagccaatcatagaaattggagtaaaaatattaagattaattaacctgaaccaaagatctgtgttttctttgttatagaatactgctggggagagtcagtattttggggtttgttattttgttacagcgaatactgagattataaagggaatttctgtaatcagagtagcagataatatttcccaagtgccttaactgtttctaggcactttatataaaatgtttttaaaataataataatatgcagtagttactctcattttgcacataaggagatggaaaatcagaaaggctaagtcacaaaactaaaaggcagtggagttgggattaaaatttagacttgtttaagatcagcatccatgtcttttcaagttaataagcctcagtaaataaatcatgctagaaatacctctgtgacagaaaaccttgtgggaaataaataatgcttaatgcttagttaccttaggaacacacttgggaagttatgctgaaagagtcagtattacctgtctggcatctgtctcttttgctctagcagtatttaaatttaatgtagtactaatttaatgcacatgatctatgcttaacctttttagaccttagtattataaaactcagatggaggaaaacaaataaaaataaaaaacatacagcttagcgaattacaagctgaatacccatgtaactaccacccaagtcaagaaatagaacatttccactggctgcaaaagctatccatgtgcccttcatgatcacaggccttttccattcttcaaatgtaactgcaatcttgatttttataataaccacttttctttatggatgtatcagctaaaagtgcattcctacacactatagtttagtctggcccattttagaaatctgatgtcttttaagtcttttaatctacaggttcttcttcaatctctttcttttccttataatctatctgagggagaatttgtacttgtaccctttaactagtataatttaccttaatctaggtgttactgacttggaaacttataatgcattcaacctgttcctcttttatatttccagcaattggcagttggatacagagatgtaatcagagttgagttaatctcttgagtggtggtgtgttcttttatcaggacacacataatgtctggttttaactttttttttttcatgtcagcagctgttgattcttaatggttagaaagatcgttgattccttgagagttgaaaaatgatgatactctatcattctttttaatttatataattttaaatatttgatgtgttctagcccactataattaaaataattagaaattcattttgcttcatatatatatatatatttttttttcttttttcttttttttttttttgagatggagtcacactctgttgtccaggatggagtgcagtgatgtgatctcagctcactacaacctccacctcctgggttcaagtgattctcctgcctcagcctcccaagtagctggaattacaggcatgcgccaccatgtctggctaatttttaatagagacggagtttcgccatgttggccaggctggtcttgaactcctgacctcaggtgatccgcctgcctcgccctcctaaagtgctaggattacagctgcacctggactatttatattttttaattgtatttgtttgtataatttgattgtatttgtttgtatagttataatgcccagagcaactacagtatacatatgtaactgtatacacagtctactggtatcggcgttttacaacactgaatgaaatgtagagatctgccggtcatggtggtgtaatcccagcactttgaaaggctgaggtgggtggatcacctgaggtcagtagttcaagaccagcctggccaacatggtgaaaccttgtctctactaaaaataattttaaaaaattggctgggcatggtggcaggcgcctgtaatcccagctactcgggaggctgaagcaggagaatagcttgaacacgggaggcagagattgccgtgagccgagatggccccactgcaccccagcctgagtgacagagtgagactccatctcaaacaaaaagcaaaaaacgaaagacacccagaaatgtagaaaccttacttccacttaggtctctttattgtccctacttttaaatatcattatcttgagtatcagagatggtgttataatttttgttgcaattatccaatatgatttataaaactcaggaaaagaatagactattatgtaaccccaaatttctgctacttctgttcctctttcttccttattcatgctccaagatcccttcatttatcatttattactgtttcttagtctattctggaagaactaggacacatctatttatttttaacaataaaaaaacctgatgtgtttgttcaaatatgtccaattccaattttggatgactgggtttttagttattctctttatttcactttggctctcaaggacacaggggacattagaattagaatattccataattattctatcccacatttcacatacacattctcagaataactatgctagtactattactaccaattctgattactgaaaacaacaaaacaaaatgactttgtatatgctacatctattacctactactttttaattgtcagagcttatagctgtcacatacaatattttcttctctctaaccctcatttatttttattctgcaagtgatttttttatttaatgctctgcacagtttcttctgttgatcttcctgttgtcattttgatgttttttatgcaatttattttaattttttgaaatttggtctccagtagatttcttaagaaggactaatagcaaccacattttggatctacttaatgttatgagcagtttttgtcctttatattgaagggtgttttacttggtataaaatctttgactcacatttttatttttctgggcatcttaattatactttctggtttattcccttccccaccccccccccaaaaaaaagcattgctctcaaagaaaattatttcttttttcttttatatgtcatatgctccttttatctagatacccataggattattttttctttctttaaagaattttcatttaaatttaaagaaaatttaaattttattttaaaaaatttcagcatttcctagattatgtattaacgttggcattacgggttgatactttctggtacaccatgtgctctttggatacacagtttgatatgtactttagaaaaaagctttttgaattatagttttagtgtttgtttggttcccttcagggcctagataatagagtggatgtgtttttctttaattattttgaaagtaccatcccattgttttttagtgtcttatgtaaaacttcagaagccattctgagtcatgttttattgtaggtttctcttttatttctgattatttttggtgagccttcatgatcttgattttattcccagtgttctgcagtttctcaaacaggtgccttagtgcaggtcttcattctttcaatggataggcactaggtgaaccatttttatctagacagtctggtgcttccgcctgaggaattttcttccattatttctttgaaattttctcttcctttccttaattttctaattttacaactcattagttgaatacttggtcttctggatgaattttctaattatttttatctttatttgtctactttccatcttgacaccttttttaaaagtgtaatcaccctttttaagtatacagttttatatgttgacaaattacagtcatttaactgccacacagtcattgcaaaaattccctgtgcttatttgcagccagtccctttccctacctttggctcctgccaaccactttctggaactttctgttcctagaatttctccttaaaatcttttttttttttttgtactcctttctgtaggtttcctcaacctgtatataatatttttaaactacccttctaataagtattttactttaagttacatttaaacctttttaaacatctattcttgcttcatggttgcaatgtcattgtatctctttgtgaatattaattatgatttcctggaagattgttttcgtgtttcctcagaattctttttctctctttgttttgcttttttttttaaagttgaatatgtttctcagctatctgatggttcttaatgatgtaatgatattaagtttgaagtgcagaaaatctgatcagaagctctatgtgcatggatggatcttgcaaactttgaggcttcatcgtagagtgattgaataactagctggtcattgattggtgaccctcaagttatctgtaaatgtttttcttggtgtggttttctactttcagagaaatagccaccaatgtccttcttgattatataagctgccaatcttcttgatatggggcaggaaaagggggctttgaatcttactaatgactatgcagaataccacttaaccctcttgttgtgactcttatgcctcatgcaggtttattatatacttagtgttcctatatcttgcatctgactagtgcatttcctctgatatctgtaaaacttctttattctatgtagcttaatagatctgaatagggtaaaatctgggcatacagacatttttttcaacagattttcaaatgacccactgtttttcacagcgagcttcatctcagccttccattacccttggatcctcaagctattgaagctttctagagttctacagggcaaattggtttgtttcttcttcattattactgtaagattcattcttcacctctgctgggccactaattctctatctactttttctttgagtcacaggtattttttagtttcatttaagatagtgtctagattttggtttcttgttttatttattgcttaagggaagtttttgagagtagaaaggtatggaaatgtcttcacatcaatcttgaaatgggaagtctacagcagctatttgcttaaatattcctatggacttcttgtacataaactgcagccttttgtagcattcgacacacgtatttttcgtgctggaattttctttcctttgattttcattactctcttttaaatcttgcattctcttttgtctatttttatggtgccactttttatctattctacctcttatacatggatacaattcagatttttattattgtccttcttctgtcttttcatcagtgatcacttttactatcacatctagcattgacctaactaaaattccacatatctatcttctttctggacattttcatttatgttttttttctgttttcatgacagcacaatttttctatgtaattaggcttgacgttttggaattacctttaactataatttatgtatttaattggcaattaaatctgtttggttctttcttcaaagttgtatgtgattacattcaatgtttccattccatcactgctgcttgaatccaatttgaactatttttttctctttctaatatgagttatacagtgcacattcgtatactaaagaaatctactgagtgtaaatttcataaaactgatgtaaggaagttggaatttctaagaacttaaaaatacatacgtgtatttatattaaattcaacacacacacacactgacacatatatatattcattaggcataaaattcattaaagaggttggtaattttatggtggctgaattcgttatatgaaaaggataaatttatttcttaattgttcaaaaaaatgtttctcattaatatgcacatatgcaaagtagaaatggttccaagcaaaataccatgagattttttcctcctagatattccttcctatgttattgttaggaaagatatgatgaggatatgtgactttttccttataccgtcaattttattagagagcagaatgcacatggccaacctttgttatttaatttctggactgaatatgatattgggcagagccagacttgctttcatttgataagccttcaccattttgggggctatttcttcctaggctgttctacattctgccatttagctgaaaatgccatacatttgctcaactctgtctcttagattgcttattttattatttgtacagaataactcagaatttaacataattctgttatatcagagattttatgatcattttatatcatttagatctgagacaggtaggttttctccctcttcaggtcttcgtaattgtgtcaagctcatataaaacttaaaatggatgccttcttggtatgtaagtttgaaagacatgatttgtttgtttatgactcgcgctattgcctttacttctgaacacaaagaacttacttaatgggtccttgctgtgtgatgatgcagagatgatttctactccttatttatcagtttataaaagagagactttgagaaggggtaatttttctgatgtcctacagaataaattgaacttgtcgtaatgatgaggcaagaatcccattttaggaaagagtctagagttaagtggaagagaagaaatcatttgaaagcatagatagcatgtaccatgaatggatgaaccaaaagtgcaagccattagagcatagtgtagaatttatgcagaaggttagagagagaggacaagcttgctgaatggatgacaaaactaatatagtttgtaattcattgttgctgagatttagtaattgatctaatttggcattactccttaacaaattgtttagatatttaatgcccagtgtcaacataaaaatgtacctgatttgaagtatattcatttgaaaagaaacttaaaattaatctaaatgtaggaaataattgtctaaacaaagcactcccacatacaaggacaaaatcctataaccaatagctgtttattagtgtttatttttctagattttaaaacataattactgcatttcataggccactagggttcaggtagtgtgataatcaatgactttagggttccttcagtctgattttaggtcttggctagtacacttactagctgtatggtctggacccagttacttttcttctattagtaatagcaaatgattcaatgtgtaaggtgtcctagtcaatcttgtgttttaagttttggatattaacacctttattcctcagagaaactctagatattattgacccattttacagatggaaatgggcactcagagaaagattaagttgctttcccaaaagaactcaaatcatggtttcttcatcaggaacattttgctgatatatttttattttttggccatttctctccacaaacattatgctcccaacaacattggcatttgcagttgctggaataagtgagccattttatatctgtatggctttgtcatgcacttgcctccaaggtgcttcccaccaccctcctttttttttttttctagctaaccctccatcctccgccaagactcagtttgaacaacagcatcacttacagcaggaagccttccttctctgtccaccttaggctgaactaaaaacaatactgtgggctcccatgtcattcttcatgttttatcttttcattttgcattgcagttactgttttgtctatctccatgattgggttgaggcaaaagtaacctcctatctgtatttgtatcaccagaacgtaatctaaccgaataccttccagtataaagtagtagggaagtaattgagagcagaatgtgtgtgtgtttgtatgtgtgtgtatatattttacataattatatatatactatatatattaattataagctgtggaatttgaacaaattatttatttttagcttctgcttcttccattgtaaaaatgggttcaatactattccaccctcatgggataactgtaagaataaagataatatatgttaagcgcatacatgcccttagaatgcttacttaataagtgacagctgtttttatgatcattattagtgtcttagattatatggagacttttcatgtaatcacatatggacattttctcaggaaaccaaaatgtgtagtttatcactggtcctggatcatgggcaccatttattttcatgtcagatattttcactgagaatatttcagttaattgttgaaaagagcagaaaataattcttcacttaccaaaggtgaataggacattcaagttccctttattcgcctttaaatttgcaacatttgtctaggtacgttaaatcaaaattaattgtattgcaagattaactccattattcatttcctttactcagcatatgagtaaagattgctagctcattcaaatagaatcattgcttaaatggatttttcttccttgcagtctaattatttagtggttttaaaacctgtattcaaaacagaaaattttaagctttcatgcaaaaaagcaaaatgtttaatttcttaagagtcatctccacgataagatagaaaaactctcttcattatttgtatgtactgtaatgttaattttatttatgctcttataaaccttctgagagagccttgtgagttccaaattttaaaagatcagaagttttttcctccttagtaatattttatattttttatttctttcttatactcttcaatatgatttttcttaagcatagattaaatgcacgtaaaagagaatgcttccttgaaataaaactgcttatctccttaaaaattggacctttaaaatactcatgccagggaatattaagtaaatcatgagtctgagttctagctgtggttatttggaaattgtttcctatcgtcttcctaagccacatttggaaaatgtgaagcaaaatacttattactgacctcatcacttaaagccatgaaaaaaaatgcatctactatataaataaagctgctaaattagattggagttattttttatttctgacttcttgctctatattttattgggaattgatcatttatagttaggatattttattgcagctacatgtgcacagtgtatattggcttctgctcatcatggtattattaggttttcctattccgctttccttttaggaattgacctctttgtggttgtacatacacatttttagtagtttcagataaagtcttgttttatgctttatgggctcagctatttgagaataagctgtcttctgatatatctttataataaaataatgaaatgcccctttggaagtacatgtagcatttgaagatgcttttattattggtacttccaacagctggttttaagctatgtccgatgaaaagattttttaaaatgtactgtattaaagttatttttgtacatcaaattttgacattctattgctcttttaagcaacagagtctaaattatttgtcttctctgacctacatggtagactttgaagacctggaatttatctgtatttttaacagcagtctatgcgtctaacaaagtgattagcacatgatttatactcaaacaatgtaagaaaaagaaagaatgagtggttaagggtatattccttcacacacaaataacatcttatgcaaagttcctgaggcaggaagaagcgtgatgtgttcctggacctgaaggaagaccagtgtttctggagcataatgggtggcaggactatggcatgaggtgagattatcaactttatcagggacttaaggccatattttttaaaaattggatttctttcacagtataaagagaaataattatggggttttaagcaggagatgacaaagtgaattttagagtgtttaaatttgctgttctcggagactggttcagatgtgggcaagaatgaaaccaggagaaacccagtaggaggcttgtacagtatccagggaagaagatggtgactcttgtggtggtggttagtggaaaaaaataagattgaaactgggagaagataaaatctgtgagatttctgcagatgtgtaattctggcattaaggctacacattaggggtagtagatcaaaagattttagatatgctatgtggaagatgtctgagacatccaagtagagatatcaattaggcagtggatatgggagtcggtaactcagaaaagaggttttaattcaacaaatgaacttggtaatctttgatatatcactattattcaaatacacaggcatgggtataataatctgggaggcagtattgagaaggaagcaagtccagggataaagcttgagaaattcagacatttaggaaatagaattttgcagagttagcaaatagaccgatgaggaatagctgatgatataggagaaaaagtaggattgtgaggaccgagaatgagtggtcagccttgcctgatgccactgaaacattactaatcttggcaagagaagttttagtgatgtgaatgggacaaaaattgagtaggatttattaagtaggagaggaggatctaacggcagcatatctagacaattttcaaacatttatctgaatgattagcagataatggtatagaagtattagggacacttgggatcaggggatgactttgaaaagaatgatacatattggagcaatttatatgttgacagaagttgtctagtagagagagaatggttggtgattcatcagagggcagagataatggtagggctttcagtgtgatgtatatgacaacatcatagtgagagagggtaagggagctatgtacttgtcattttttaaaatttgaaatgataaagttattctaaataggtgatataaagtatgaattgtatattgtaaacactagaacaacaactaaaaagattatataaagaactgtataaatgattataataaaaaagccaagagaaaaattaaaacggaaatgtaaaatatattcagatatctcaaaaaatggcagggaatgaaaaacaagaacataaatgtgttaggcagattcgaaagatgtcttgccacctccaccccaagatacctgtccacaggctgttcagtcaagctaatccaggtacagtactgctctgaagggactctgcagagggaattaagtttgctaaacagcacacgttaaaactgagggattatcctagatttttcaggtgagcccactgtaatcacataaagctcttaaaagcataagaaaacagaagagtcagttggaaagatgtagcagaagagagaaattagagagaaatgaagcctgagaagatctcaacttgctgttgttggagtggctaggtgaggaggaatgcacgtggccttaaggagctgagagtggttccgagatgacagccaaagaactgggacttcactctctaactgcagggaactgaattctgccaacactgaatgagcttgggagctgagccttttccagagcctccagaatggaatgcagctctgctgacacctcaagatcagccttgtaagactctaagcaatgaaaacagctgagccaagaccgacaggagttgtgagataaataatgtgttaagccactaaatttgtcattccttttttttttgagacaggatcccacactgtcatccaggcttgagtgcagtggcatgatcatagctcactgcagccttgacctcccaggctcaagtcctcccacctcaacctcccaagtagctgggactagaggcacatggcagcatacccagctaatttttttttttttttttttttgtagagacgaggttttcccatattgcccaagctggtctggaactcctgagctcaagcaatcagcccatctcattcaaccaaagtgctcgaattataggcgtgagccatggtgcccgtaaaaatttgtcattctttattaaggcagtaataaaaacaaatgcatattttcgtttctgaagtagggtgcttcagcaacaaatacataaaaatgcatgagtggctttggaatcagactatgggaaaagactggaagaattttgaggaacattatagaaaaagcctagattaccttgaacaggacaatagtagaaatttagaatccttctgatgaggacttaaaagggaatgaggaacatgtgattggaaactggagaaagaggaacaattgctatatgatgaagagagactggcaaaattatgtcttgtagttatgttgcaagcagaacttttaagtgatgaacttggatattaagatttccaagcaaaatactgagagtattacctagtgtatttgtcagcaagatgtcacagactgggtggaataaaaacaaatttattcttcacagttctggaggctgggaagtccaagatcaagtaggcaaagtaggttcattctgaggctgctgtcttggcatgtgggtggccatcatcttactgtgtacacatatgaccttttctttgtgtgagctggtggggacagggtgctcccggatgtttcttcttttgaggatgctaatcctatcaaatcaagaccccatccttaagacttcactgaaccttaattactttcctactccagatacagccacattggatgttagggcttcaacgtattactttccttggctggggtcatggaggaagaggcacaaatattcagtccgtaacacctggcttcttcttgcagcttatagaaatatgtgagaggaaagagataaactgaggggaaaaactgtcaaacaaaaaggagcaaagacttaatgattttagaaattttcactttacccagcaaaagactaaaattaagagattcactgtcagcaaagaatgcactggagaaaaggctaacgatatgattgtatgattcttctctgaaatctcaagagagattaaaagatcagagtatttagttacataaaaaactctttaaagagattaagggtgtgacttacagaaccccctcattcaaaccagggtgcttctagaaatctgaagggtgttgtcactgatccatgtttgcagaagccaaacaagatcatctaggaaaaatctgtaggaaggcatctggtctaatgtagtgaacccctgttaaattaatgccaaactcacaagattgttgagaattgtataccagtagaacactgccagcatggacagaaagggacagaggctataaaacgaaataaggctgtttgaaccctcaaattctactggtaaataaaactactgatgaaactcttagctgccaacacgtgctaccttgcaggaaaaaagttgactcagagggcagagtagcttgcccaaatcgtggcattttgagcctaaaggatagagctgtgatccacagaggagttttcccaggcctagaaacctaatgtattttgctgacctgtacgtggatactgctttgtacccgtcagcttgttctaccatccgtgttccccctgttggaactggtgtatttataactgacatccaatgcctgtctcacaattgtatgttacgagcagataacttgtgtctttaatttcacaggtccacagatggacagaaattgttcccaggagttatacccaatggattattcaactaaactagatttagttgagagattttggatttttgagcaaatgagatttaaatgagattcttacgctttgagttgttgctataatggaatgagacttgtcttagtccactttctgtttcttataacagaacacctgaaactaaggaatttataaagaaaaagaatttgtttcttacagttatggaggctgagaaacccaaggttgacgagctacaagtgatgaaggctttcctgctgatggagactctgcagagtcacaggcagtgcagggcctcacatggtgagggggctgattatgctagcccaggcttctcttcctgtcccagttttgtgataatccattaatgcattaatccatgaatggattaatctattcataagagctcttcctcttaaagtccccacctctcaatactgccacattggtgattaaatttcaataagggttttggaggggaaaaacattcaaagcatagcagtgctcttggaaacactgaaagaagtatgaaggtattttgcatttgggaggggcttgaatctttgagggttagagggaagactgtggtagacataattctaaagatatttcctcaggcttcctctcttctggttattcaatcaagtgatgatacaggtatagctgtgaagggacttttcagatataattaagatgtaatcacctgatattaaaataggaagattatcctggattatctgaatggacctactgtaattaaatgatctgttaaaaatagaaaagcaaggcaaagaattagaaaaattcatcaaaaggggaagtaagagagactgggaacatgagaaagacccaacccactgttaccggagggcaaggtgaggagaaatgcaggtaatataaagatttgaggaatgttcccaactaacagccagtgaagaaaccaggcacctccactctgttgatgcaaggaactgaattttttgaatttacttgagtgagattagaagccgattttttccagaaccttcacaaaaaaatgtagccctactaataccttgatttcagccttatgaagctctaaacagagacactaactgagccacactgtctccagacttctgaccaacagaaactatgaaataataaatgagtattgttttaagccactctgctaatttgctacagcagtgatagaaaactcatacaactgtattagtccgttttcatgctgctgataaagacatacccgagactgagcaatttacaaaagaaagagattgttccacgtggctggggaagcctcacaatcacagcagaaggtgaaaggtacatctcacatggtggcagacgagaacagagagagtcaagcaaaaggggtttcttcctgtgaaaccaatatagtctcatggtacttattcactaccacaagaacagcatgggggaaaccactgccatgattccattatctcccaccgggtccctcccacaatatgtgggaattatggcagatacaattcaaggtgagatttgggtggggacacagccaaattatatcaacaacaaaacgtaaacgacaagtagaaaaataataataaaatggcaggcataaatccaaacatattaataaccacattaaatgtaaatgatctagccacaccattaaaaggcagagatgatcagattggatataaaagaaaggcccaattgtatgctttctactggaaacttaactatcattatactattaagttaaaaatagaaggatggaaaaaatataccacacaaactcaaattaaaacaaaagctagagtgtcaatattaatatcaaataaagaagacttcagaaccaggataattaccagggagaagaaggaatattatgtaaaaagtgtcaacttagcaactcagaactatttatataggtttttttgtttgttgttttatttatttttaccacaaattatcacaagatatgaagcaagaactgaaaagagagagaaatacaccattgcatttggagactttagcattccctttgtcacttattggtagaacaaataggcgataaatgagcaaatatatttggaaaacttgagcatcatcatcattcaacatgacccagttgatatttatagaacattttacccaacaacagcagaatagagattccttcaagtatgcatggaacattcaccaagatagacaacattgtttgtaaaaaatatctaagttaaaaaatcgaaattattcaacttttacaataatagaggtaaagtagaagttgacaacagaaggatatgttaaaaatctcacatatttggaaatattaaataacgtatataacatatcaataaatactcaaaaggtcaaagaagaaatatcaaaggaagggaggaaatattttgaactgaaagaaaatatatatgcaacatcaatatatttgtgatgttgctaaaacagttcttaggggagaatttatagcattaaatgcttatatttaaaaagttctcagatcaataattttagcttctacctacagaatctggaaaaagaacagaaaacctaaagcaagcacaaggaaggaaatcataaagatcaaagcaaaagtcatttaagctcgaaagagacagacattagagaaaaatcaatgaaaccaaaagctgattctttgggaacaaaatcaataacattgataaagttctaaccagattgaccaagtgaaaaataatgcacaaattacaaataccaggaatgaaaagaggggatgtaattactgatattagcatcacaaaaaatggaaaactatgaaagttctatgcacatacatttgaaagactagatgaaatagacaaattatttgaaagatgtaaactacaaaaccttacccataaagaaatgataacctgaatagcctacacctattaaataaattgaattactgtttaaaatcttacaaacagagaaaatgtcagatgcaggagggttgggattagagtaaggaattcgaatgagaaaaatagtggccagatgatgtctgggcagtctgtggtgtagtgctgaaacataggggaatcttcgactcagactgctggcaggaatggaatggaacccctaacaaaaagtctgtcttggtcataattggcccatgcacagctaatgccagttattatcttcatttagacagttaatgccatgggcagtgaatgtggtcagtggctacattcaagaaggtctaggtgatctttcaagaagagaaagagtctcaagaggacaccatgtcatgttaaaaagaaagagctatattagatgtgttaccctaatgacatagtacttatgtggaggagaagaatttgactaagttgtgtatgacttcaggtcttggtgctactggtagtggagacagttcctgtgggcctgagtgctttcataagctccctactcagccattgtgttctacactggagtgaagttttccaggcaatgaatataaacatcttgctatattccagaactctattataataattgatccattattaccaagttaatctaattgtagttgttgataattttttttctttttatagcaatgttgttgatcttaaaagagagcacagtgctagagcactactaatctactttgtaccattctttatgtggcattgtacttatttttacccttttattataaatctgaaaaactgctctgttatgttttatgttgaggtagctcttaagagatagaaataaaaagttgacttttcaaaattacaaatagtacttgtggtacaaatatttcccatgtgattaaaaagggagaatttcctgctcaccaaattattcttacaaactccacaatgttggccaagtcaaggaaaatgtgaaatgatgctcttctaaatctgaaaaatactaaaggatcatactaaatttctgcagtactttatagttccttgtccatattgttgatctattaaaactacaaaatattatggattcagtataacttttaaacatttttgtacagcttccagaaagcatttggaacattagattatattgtattctggttttgaagaaaacttgcttgggagttaattctaaattatgcattaacttgaatattttaaacaatggtttgaatagttatgggatgaagtagacagggaaggaaatagtgggttttaaatattgattttcagtttatgaattgggacccctcacttaataatttcccttgcatctcacagatttatttttaagactgatgagaatggatgaattcaaagttttgaaaatataaataaagacatgaagttatagccccagaatagtgtactccttctaaggacaccaacagttattgttttcatgattctaatgtattagtagtcagtggaaggcatgataaaattggcactgccaaaatattcattcattatatttcatattattggtggctgggggggtaatcaatgttttcaaaagtcaaaaaaataaaaaaatttaaagaaaaaatgtcatttttccttcaaattataatggacatagcatccccccactaaagagcaagaatgggttttaaaagaaacagaaaacttgaggtgttatatagatttcattgctgacattttttgcttcaatttccaacgtcacttgtgtacgtttacttacttctaaccctggtggattcaaactttttttggcagatgttttcaaacacaaaacaagtctaaaaatatcaaatcaaaatgaaggtcagaataagatgttaaaagcagttgttgttttgttgaagccataatacaaaaagtattaggtttgatatcatgattatcagagtgccatggtgaaaggatgagtgacttctacatgttgaaactaaactatagctttaggtcatgtgtgggagacgggtccaagtgagtgtatatagtatttgtcctttggtatttattgttgttgttcgggttgttgcccaacctgcagttttcaggaaccgtgaggtacagccagatggacagcctgtgctttcacatgctgcagctcccccatgcttccctctccatctggagtctgatggactttgccaacactgcagcaccaggagctaatttctacctgcctctcctcagctatgttctcttgacggagcatctatttatatatcacctcatgctgcagcatccagctggttttgttgttgttgctttccatttgcagagatgttaactgcagtggtatttctttttcatttagaaaaaaaaaaaaaaaagaaagaaggaaacaccttcgagataggtcatctatttgctctgtcatatatatatatatatatataaatattatgtacaaatgaatagagtgaatttcactcagtctagtcaaggacgaaatgccatttacacacctctttatttaacactggagtgtacttttctttaaatctccttttgcagctttttaagggagaaggggtttctgaaatggaattatgtgaatgttagcattttataattgaaattataattacattggaaacgtaaggttctaagcccaagaagggatcctgtggcaaaatctcttgtaataaagagtgataatattttcttatatttttacttttcaaaagtgatctttgttttcaaacattggtgctcacctaatttatttatttcttttcaattttactctgatggctgaattcctaatttggatattatcttactgtttttacttttaaactcaagatttacttttattatgtcttttttgagatctttatttaactcctcaaataatggctggcttcattcaaatattcactaactggctggatatcagaatattgccaacggctatacaacattacccaataataagaagagaaacaaaaggatatggggagaggaggaggattttaagaatgttttggggtgagattgactatttgtctgaaatacccagaacacatacacgcttgagaggagtggaagggataaatacacttagaaggaataagtaggttctccaaaatgaagattttttatgattccagaaaatattgatgggcttataaaaagataaatggaaaaaattatgaccacaaacttaataatagtactgggagaaaaacacagtaaagcacagcattaggagtgtgagagcgaaagaaagaaaagaactggattctggtttcttcttcatggctctgtgtcctctgcttttggatgcctatgtaactttgccagacctctcttgccctgtgacctgcaggtattgggagagccacagctaagatgtcaggacaccctggaaaccagaaaatgcacacattgcatatgaaacccaagtcaggaaccttgctggaaataaatatcccatagagagccttggcactctgaaagcacccagaaacaaaggtaattgactgcactcaatataaactatggtcaaaccccaagagaaataaggaatatagaaacaaaaaaccccatccaattgacagcaacttcacaaagataaaggaacatcagccctctcagatgagagataatgaacgcaagaattctggcaatggcaattcaaaatgtaagagtgtctccttacctccaagctgtcacactaggtccccagcaatggttcctaaccagactgaaatggctgaaatgatagacagaattaagattcaggagaaagttgaaacacaatccatgtaagccactaaaatgatacaggagttgaaagacagcgtagccatcttaagaaaaaaccagttgaactctggtattgaaaatttcattgcaaggatttcataatagaggtggaatcagtaacaacagaatagagcaagctgagaaaagaatcttggagcttgcagaccagtccttcaaatcaacccaatcagaccaaaaaattaaaataaaaataaaaagaaagaaaaaagaaattataaaatgaacaaaatctccaagaaatataagatataaagagcccaaatgtgtgacttattggcattcctgagagataagagagagtaagcaatttggaaaatggtatttgacaatatggtccatgaaaatttccctagtctcactagagagggcaacatgaaaattcagtaaattcagaaaactcctgggagatattgcataaaatgattcatttaaagacacatagtcatcagattctccaaggtcaatgagaaagaaaaaattattaaaggaagctagagaaaaggggcaggccatttacaaagggaaacccataaggctaacagcagacttagcagaaaggctacaagctagaagagactggggacctatattcagcatctttattgaaagaaatttcaaccaagagtttcatatgctgccaaactaagtttcataagtgaaggaaaaataaaatcttttccagaaaagcaatgctatgggaagttgataccattagaccagccttacaagaggtctttaaaggagttctaaacatggaaatgaaagaacactacctgattatcagggtaacctgcccccaatatttcaatgtaggttctttctattttccataagtgttggccagctgagaaataaagagaaagggtaccaagagaggaattttacagctgggccactgggggtgacatcacatatcagtaggaccgtgatgcccacctgagcctcaaaccagcaagctttttattaagggtttctaaaggggagggggtgtaaaacagggagtagatacaaagatcacatgcttcaaagggcaaaaagcagaacaaagatcacatgcttctgagggaacaggacaaatggcaaaagcagaactactgacaaggatccaacaaagatcacaaggcaaagggcaaaagcagaactactgataagggtctctgttcagtggtgcacgtattgtcttgataaacatcttaaacaatagaaaacagggttcgagagcagagaaccgatctgaccacaaatttaccagggtggagtttttccccactctaataagcctgagggtactggaggagaccagggtgtatctcagtccttatctcaaccacgtaagacagacattcccagagcggccgtttatagacctccccccaggaatgcattcctttcccaaggtattaatgttaatattccttgctaggaaaagaatttagcaatatctctcctacttgcacgtccatttataggctctctgcaagaagaaaagtgactttttttgcctgacctcacaggcagtcagaccttatggttgtcttcccttgttccctaaaaatcactgttattctcttctttttcaaggtgcactgatttcatattgttcaaacacacgttttacaatcaatttgtacagttaacacaattatcacagtggtcctgaggtgatgtacatcctcagcttacaaagatatcagggttaagagattaaagtaaagataggcataagaaattataaaagtataatttgggaactgataaatgtccatgaaatcttcacaatttatgttcctctgctgtggctccagccggtccctctgtttggggtccctgacttcccgcaatacctgataccacaaaaacacactaaagtacatagcccacagaccctataaagcagcttcacaattgcatctacaaaacaaccagctaaccacagacaggatcaaaacctcaaatatcagtattaaccttaaatgtaaacaatctaaacaccccacttaaaaggcacggagtggcaagttagacaaaaaaataagacccaaccaattgctgtcttcaagagacccatctcagatgtgatgatacccacaggctcaaagtaaagagaaggagaaagatctatcaagcaaatggaaattaaaaagagcaggggttgttgttcttacattagacaaaatgactttaaaccaacaatagtcagtaaggacaaagaagggcattacatagtggtaaaggattcaattcacaagaagactttactatcctaaatatataggcgtccaatgttacagcacccagacttataaaacaagcacttctagacctatgaaaaaatgtagccacacaataatagtgggggaacttcagcactccactaacagctttagacagatcattgaggcagaatatcaacaaagaaattctggatttttttttttacctttttaaatgtaatttatttatttacttttatttttccataagttattggggtacaggtgatatttggttacatgagtaagttgtttagtagagattgatgagattttggtgcacccatcacccgagctgtatacactgcaccatatttgtagacttttatcgctcgtccccatcctactcttccacccaagtaccctaagtccattggatcattctttttttttttttttaaattattattatactttaagttttagggtacatgtgcacaatgtgccagttagttacatacgtatacatgtgccatgctggtgtgccgcacccattaattcgtcatttagcattaggtatatctcctaatgctatccctcccccctccccccaccccacaacagtccccagagtgatgttccccttcctgtgtccatgtgttctcattgttcaattcccatctatgagtgagaacatgcggtgtttggttttttgtccttgtgatagtttactgagaacgatgatttccaatttcatccatgtccctacaaaggacatgagctcatcattttttatggctgcatagtattccatggtgtatatgtgccacattttcttaatccagtctatcattgttggacatttgggttggttccaagtctttgctattgtgaatagtgccacaataaacatacgtgtgcatgtgtctttatagcagcatgatttatagtcctttgggtatatacccagtaatgggatggctgggtcaaatggtattcctagttctagatccctgaggaatcgccacactgacttccacaatggttgaactagtttacagtcccaccaacagtgtaaaagtgttcctatttctccacatcctctccagcacctgttgtttcctgactttttaatgattgccattctaactggtgtgagatggtatctcattgtggttttgatttgcatttctctgatggccagtgatgatgagcattttttcatgtgtcttttggctgcataaatgtcttcttttgagaagtgtctgttcatatcctttgcccactttttgatggggttgtttgtttttttcttttaaatttgtttgagttcattgtagattctggatattagccctttgtcagatgagtaggttgcaaaaattttctcccattttgtaggttgcctgttcactctgatggtagtttcttttgctgtgcagaagctctttagtttaattagatcccatttgtcaattttgtcttttgttgccattgcttttggtgttttagacacgaagtccttgcccatgcctatgtcctgaatggtaatgcctaggttttcttctagggtttttatggttttaggtctaacgtttaagtctttaatccatcttgaattaatttttgtataaggtgtaaggaagggatccagtttcagctttctacatatggctagccagttttcccagcaccatttattaaatagggaatcctttccccgttgcttgtttttctcagatttgtcaaagatcagatagttgtagatatgcggcgttatttctgagggctctgttctgttccattgatctatatctctgttttggtaccagtaccatgctgttttggttactgtagccttgtagtatagtttgaagtcaggtagcatgatgcctccggctttgttcttttggcttaggattgacttggcgatgcgggcttttttttggttccatatgaactttaaagtagttttttccaattctgtgaagaaagtcatcggtagcttgatggggatggcattgaatctataaattaccttgggcagtatggccattttcacgatgttgattcttcctacccatgagcatggaatgttcttccatttatttgtatcctcttttatttcattgagcagtggtttgtagttctccttgaagaggtccttcatgtcctttgtaagttggattcctaagtattttattctcttttaactcaacacttggccagttgcatctaatagacatctatagaatattcctcccaacaactaaagaatatacattcttctcatctccacatggaacatacttgaagatcaaccacatgcttggccataaaacaagtctcaataaatttgaaaaagttgaaataatatctagcatactcttggaccacagtgcaataaaaatagaaacaaataacaggagtatctttcaaaaccacactattgcatggaaattaaacaacttgctcctgaatgacttggatgaaacacacaattaaggcagaaataaaaaagttatttgaaattagtgaaaacggagacacaacatacctaaatctttgggatgcagcaaaagctgtgttaataggaaagcttatagtactaaacacctacctcaagaaattagaaatatctcaaattaatgatcaaatatcacaccaaaggaactaaagaaacaagaacaaactaacccgaaaggtaacagaagaaaataaatgactatattcgagcagagctgaatgaaataaagacccaaaaatccatacagaagttcagcaaaatcaagttggttgtttgaaagaataaacaagattggtagatcactagttagattaacaaatagaaagaagatccaaaatagcccaattagaaatgacaaaatgatattacagcagatcccacggataaacaaaaaattcctcagagactattatgaaactcctatgttcacaaactagaaaatgtagtggaaacacacaacctcccaagattaaaccagaaagaaattgaaaccctgaacagaccaataatgaattgtgaaactgaatcaatagcaaaaaaactgtaaacaagcaaacaaaaaccctagaatagatgtatttacagccaaattctaccagatgtacaaataactggtaccagttctactgaaactattccaaaagtgaaggaggagggactcctccctaactcattctaggaagccagcattatcctgataccaaaatctggcagagacacaacgaaaaaagaagacttcaagccaatattcctgatgaacatagatgcaaaaattctcaacaaaatactagcaaaacaaatccagcaacatatcaaaaagttaattcaccacaatcaaataggttttattcctgggatgcaaggttgtttcgacattttcaaatcaataaatgtaattcaccacataaacacaatttaagaatatatatgatcatctcaatagatgcagaaaaagcttttgatataatcccgcctcccttcaggataaaaaccctcaacaaactaggcatcgaagaaacatgtctcagaataataagagtcaactctgacaaacccagagccaacatcatactgaacaggccatactgaacaggaatactggaagccattcccttgagaactggaacaagacaagcatgcctactctcaccattcctacttgaacatggtactggaggttctacccggaataatcaggcaagagaaagaaataacaggcatctaagtaggaaatgaagtgaagttatgtctcttcactggcaatatgattcaatacctagaagaccctaaagatcccaccaaatggctcctagaactgataaacaacttcagtaaagttccaggatacaaaatcaccataaaaaaatcagtagcatttttacacgctaacaatgttcaagctgagaactaagtcaagaacacggtcccatttacattagccacagaaagaataaaatatctagaaatacaccttacaaaggaggtgaaagatctatacaaggagaactacaaaacacagttgaaagaaatcagacatgtcacaaacgaatggaaaaaccttctgtgctcatgattggaagaatcaatattcttaaaatggccatactgcccaaagtaatttacagattcagcatgattcctgtcaaactgccaatgtcatttttcactgaattagaaaaaactattctaaaattcatatggaaccccaaaagagcctaaatagttaaagtaatcctatccaaaaagaacagagccagaggcatcacattacctgactttgaactatactgcaaggctacagtaaccaaaatagcatggtactggtacaaaaacagacacaaagaccagtggaatagagcagagaacccagaaacaaagctgcatacctacaaccatctgatcttcaacaaacttggcaaaaataagcagaggggaaaggacaccttattaaataagtggtgtgtggataactggctagccatatgcagaagaatgaaacttgatctctacctgtcaccatatacagaaattaactcaagatggattaaagaattaagtgtaaacacaatttaaaaatatatatgatcatctcagtagatgcagaaaaagcttttgatataatcctgcctcccttcaggataaaaaccctcaaaaactagacatcgaagaaacatgacctcaaaatacaaaaatcctggaagaaaaactaagaaatgttcttcttgacattggcaaaaaatttatggctatgttctaaaaaaaattgcaatagaaacaaaaattaacaagtgggatctaatcaaattgaagagcttctgaacaaaaagagaaactgtcaacagagtaaacaagaagcttatggagtgggagaaaatattttcaaactgtttatctaaaaaggacctaatattcagaatgcacaaggaacttaaatccataaacaaaaaataaataactccattaatatgtgggcaaaggacattaacagacacttctcaaaagaagccatacaagtggtgaacaaaagtatgaaaaaattctcaacatcactaatcattagaaatgggaaatcaaaactacagtgagacaccatcttacaccactcataatggcttttgttaaaaagtcaaataataacaggtgttggctgtgctggcagagagaatgaaacccttacacactgttggtgggaatgtattagttcagccactgtggagagcagtttggagatttctcgaagaactgagagtcaaattaccatgtaacccagcactcttattactgggtatatacccaaaggaaaataaattgatctaccagatataagcatctgcatgataattgcagcactatttacagtagcaaggtaagccaggtgctcatcaatggtggactggataaagaaaacgtggtacatatacaccatggaatacaacccagtcataaagaaaagaaagaaatcatgttctttgcagcaacatggatgcagctggaggcaattatcctaagggaacaaacacaggaacagaaaaccaaataccaaatgctctcatttgaggtcaggagtttgagaccagcctggccaacatgctgaaaccatgtctccctaaaagtacaaaaattagctaggcatggtggcacgtgcctgtaatcccagctactagggagactgaggcacaagaaacacttgaaccgaggaggcggaggttatagtgagctgaggtcgtgccattgcactccagtctgggtgacagagcgaggctctgtctcaaaaaaaaaaaaaaaaaaaaaaaaaagtggtagctaaacattaggtactcatgaatgtaaagatgggaacaatagatcaatagataaatactggggaatacaagagggagagggaaggagacaggcaagacaggcaaggaatagaaaactatctattgggtactatgccaaatgcccgggagttctgtcatactttaaacctcagaatcattcaatatacttttataacaaacctgcacatgtacccccatcccccagccagaatctaaaataaaagttgaacaaaaaaagaaaagaactgttgagttggagaatctaggtttttaagattccatattcttgaacaaaggctgaaatgagcaaatatttggattatagtttcttttcatgatggcattttcagtactttatgcttttcatatatcatttttttctctctttatcaggtaagtgggggagattatattctccttacagctcagatatgttgaacttaaatgttgtaattttaagattttttaattgagaattgaagaataataaattaacaagaaaaggtaatccaggggaaggaaagaaatacacagaatttttggaagactgaaaggaccataattgtctataatttatcataaattataaggagtacaagtgatgctcaacagataacacactctgtcttcgcctggtaggatagaagagaacatgtttccacagtgacagtgctcaggtttacagattgggagcagctgtgcttggctcagtatggacctgatgaagtgaaaatgtgtggttggggagaagtggaagaatggaagacatggagatatcagttcagctgcacgttattaaaaatttcagcaattactgaaataacatgtgttaaaccatatctttatgagaggtgtgtttcagtatctcctactgcaaatctcccatctgccatgctgtatactagaatctcaaaattttaggctacatttggcagagtctcattaaaattttactacctaatggggagatacatcttagcatatacattaaaatgaattaagtgcttcaaaagaaagatactaggaaagtcatcatggttaaatacttgggctctggaatcagactgtctgggtttgaatctgttctgtgatttactggctgaatttctgagtttcaatatcttcatcagtttttcaaaatcaggggaaaataactgaatgatttaataggctgttgtgtaaaattattttcaccatactaactttggtgctagttacacatagtaagttagttatgaggataattatgcataaaatgttatgagagcaacattgtaatgtacaagctataaagtatcaacacttaatgcctctaggtatgtttgtctgtgactgcatgtgtttgggcatgatggacctaagagctttgactttaaattcatcatgcagatctgggttcctccagccttgatgtttgagatgtaactctggatagttattaaatctctcttatatttagtctcacatgttgcaattcctacctccgagggttgttgtatgagtattcaagatactttccaaaagtacagtcaaggctaggtgtgacaactcatacctataatcccagcatgtttagtggctgaggtgcgaggctagcttgaggacaggagccgggaggacaggagcctgggaagcaataagagaccttgtctctacagaaacaaaaatcaccaacaacaattagctgggcatggtggtgcatgacagtagtcctagctattcaggcggctgtggtgggaggattgcttaagcccaggtgttagaggttagagtgagccatgatcacaccactgcactccagactgagtgacagagtaagaccgtgtctcaaaaataaataaataagtaaataaataaataaatgcaataaaaataaatagatccatctatcttaattacccatgtataattttaagcatttatatatttttatttttaatatatgaaattatgttgattgatgttatctggttatgttcaaatcatttagatttcaaaaactgcatttttagtctgtccttgactttgtttctatgttaaattagaataattaaattctaaatataggtatatcatgttgggatagtatttagactctgaaaagacataatatgtttctttgtagataagtttagataatttttgatgaggttatatttactttaaaaaccctacatacaaaaatctctttgcaaaagattttatgtcaacacccctttactctaaagtcagatttagagctatttcaaccctatggagcacagctttgaattttgcaataaatgtaggactccaatatccaacacaaatctgtgtcacaaaaccctgtgttaaattgggcactttatttcttggattttctatcagagtcttattgactctttcttagcacagtatttttaataagcttacttatcagctgcattaacccacagcatattgagtctgagaactagaaaaggactgagaaaaggttttggaggtaaatagcaatggctggagagaagtaccctacatgatcagaggaggagatgggcaccttcatgtcagcatagatacgtattcctgcagtttccaataacgttcacattgcctacagtgagtcactgagaaagaatgttaaccactatttacaaagacaggcacatgtatcttctattcatactttactatattgccatctaagaatttgatgtggaatgctcacttacctgaaattctagagcacatcatagtattaagagtggtagcatgaaggacattgagttgaacttagaaaatacaaggactagaccgggtgcagtggctcacacttgtaatcccagcactttgggaggctgaggtgggtggatcacgaggtcaggagttcaagaccagcgtggccaagatggcaaaaccctgtctctactaaaaatacaaaaattagctgggtgtggtggtgggcgcctgtaatcccagctacttgggaggctgaggcagagaactgcttgaacctgggaggtggaggttgcagtgagctcagattgtgccactgcactccagcctggacaacagagcaagactccatctcaaaaaaaaaaaaaaaaaaagaaggattagaggacagggagcactagcaaaccacctcaataaagacaaaagggtagaacaaagccatgatcactagacgattggaaagctgacaagactggagcaaaggatcaaaccagactttgaggtgtggggacctcctaactttgtggcttatggaagtcacccagcattccagttaaaatgcagatttatgggttctgtcatcacacatatgttccagtggcaacaggttaggctcaggaatcaacatttttttgtaactttccaattaattctaatgttcacactctgagaaatcttaccagggaagatgtatcgggggaaccagcccccgatatttcaatgtaggttattttctattttccctaagtgtcggctggtctgagaaataaagggaaagactacaaaagagagaaattttaaagctgggtttctgggggagacatcacatgtcggcaggttccgtgacgtcccttgagctgcaaaaccagcaagtttttattatggatttcaaaaggggaggggtgtacaaatagggtatgggtcacagagatcacatgcctccagggcaataaaatatcacaaggcaaatgggggcagagagagatcacaggaccagggtgaaattagaattgctgatgaagttttatgtcccactgggcacgcattatcattgttaagatcttatcaggagacagggcttgagagaagacaactggtctgactaaaatttactaggcaggaatttcctagtcctaacaggcctgggggcgctacagaagaccagggcttatttcatcccttatctgcaaccgtgtaagacagacattcccagagcagccagtttagatacttccccctaggaatgcattctttttctcagggctgttccttgctgagaaaaagaattcagcgatatttctcctattcgcttttgtaagaagagaaatatgactctgttctgtctggcccctcgggcagtcaggcccaatggttatctccctcgttccctgaaaatcgcagccatcttgttcctttggatgcccagatttcatattgttcaaacacacatgctctacaaacaatttgtgcagataacacaatcatcacaggatcctgaggtgacatacatcctcagcttatgaagaggattaagagattaaagacaggcctaggaaattataagagcattgattggggaagtgacaaatgtccatgaaatcttcacaatttatgttcagagattgcaataaagacaggcataagaaattataaaaatattaatttgaggaactcacaatttatgttcttctgccatggctttggccggtcactccgtttggggttcctgactgcccacaacaaagatggaaatatttgttagccattttgcaaaagagtgatgttaaaagcattccaggaagattaatctggttgagtggcatgccagaggccaatatgaaagctactaattagttcagctcagaggtggtgagagcatgatgggacatgctgacaggaacattagaagggcagaaaagttataggggtgtgtaaagggcagagtcagtggaatttgatgattcacactgaatattggatagagaaaaggagtagagcaatgcaaagctgatgtactaagatataattggaaaggaaaacaattttaaggcaatagatagactttatattgagtgtatcctttatctggtcatgattagcctatttaaggtttatttggatgtttacataacaacaatacaatgcctaggtttgaattccactttctaacttagacaagtgtcttcacggcactgaacttcagttatctttacaaggggcgaaccaccctcacagagttgttaagaaaaataagtgcacatacagtgcggcttttcatcccttctctaagttgtaaacatcagagaaaactttctatgagcgttttacctgtctttggtctccaaattttgttccctgaacaagagttttgtgtttacatgtctttttcttttacaacatagcatttctaagcaagaagtaaatatctaaatttcagaggttgttttgactatttttgaagaactattacattagtagccatcatatgatatacctaaaggactgccattcttgtaatagtaaacaaactgcttgttgtccaaaggatttcagaatacactttttctattcctattgccaattctgaattcttatccctgattcctaatttatcaattctctacataggaatacagactaagcaatgattggtgaaaacacttttttccccactattctatagagtaaggttatctgtttaaggttcaatccttactctttttgagctaaggactatttttgccaaaatagttaggtacatgaatatttaagtgaatgtggaagtattgactttttcccagagaacaatctaagtcaattttaccacattcaatggcctaaaagggggagatgatgagttttgtcatgtcaatttcttttaaagaaaactatttcagtcataatgttttctaccaaaatgtcgtttttttctatctgtgagatagaattgttgtagtagttcatcttttaaaagtcagagtttctcccattctgtgattgtagcaatagttatgatgacctacatagagaactgtgttactttgagtcaaagaaatactgattgtggtttagaaagctacttttattgctgcctgagtggtgaaaagaaagaatgtaaatgtgtatgtgttaagccttgtagaacctggaagtgttttgagctgggaaaaattgaatttcacattgagatgctttgcgtttagcaaaacccaaaacgtattttgaaaacttctttctcccttaagtttatccctctgagtattttaagtaatattatttttgtttgagttatttccaacatgttatgagagatttttgataaccgtgggacgtttttctttgaacctggaaattttatcttgccaatattaaattgtattctattccagaaagcctgagatcagtttacaatttttaatttgtttcctgatggttgaccagatatcttcagtcattcattttatgtttgtatttaattttattgaaatgcttaagtagtctatcttatcattataaatgtagttttacctttatatatttcagtagacattcatttagaaagagtttacaactctaagccattaagcatcaggattgctgtatcttttatttgatggaggtggagtgcataacattataagtatttatacgtacacacatttttgaaaaatgctgcatatatgttgtttatattcgaatgggttccagtgtctagctttaaaccaagttctgagaaaaacgtatgaaaaatgtcttctctttcttcaaaccaataaaagttatgatagcagagaatgtcataaattggttgtggggttttttggttattattttagggataacctaacacacattattcagggcctgcttttctctcccttgagggatctgtagcattcttgatgtcatgaaaatagagcacaagattggagttattaatcactgtacttcaatggactttttcttattaaaatgttaacttattaatttttattaacttattaaagtttaactcgtcctttgaagaatcttgtatgtattctcacttggacacattcttatcatatcaagtatattagaagttgttactcccaggtagggtcttaatctatgtaacgttgtatgtgtaattttacagaaatttgtagttcctacacggattttcatcctgtgtaactctaaggaaattcattagcctgaaatatgcaagctacaaaggatgctaaataagtctcattactttataagatgtaaacattgagctttaatgagtgttctaaggctgtagaagacctcttttttgaattaagtttgttaagaatgttttagtctttgcttttgtctgttaatgtttataattaatcagacgatatttatgtttattatttacttttgtgattagagatgctctattctatttaaacatattttaaaatattgtaaacattgctgttttcttgtggaacctttttttctttgatttctaacaaaatcaggaaggaatataaacataaacattcacagtggttttggaaatgaaacagtgggaatctaccacaacagagtgtttaactgaaatatgactacataaagcaggtgaattgtttgagacatttaaactctatttgagaatgttaattcccatactcaatatttattttctcctggcaagtgaaagtggaggaggaggttgggttaaaaccttctttcttcacaggaggcataagaatgctagcatttaaaatagacattattcttttgaccatgtaggactggactctaagagtctttccctttacttttttaacctattcaaatttcccgcatactctaaaataaataaataaattattatttagtaataaatgacacacgataatgattctaaagtccttccacaaaggtgccaacagtcatatctttggataaccatatacaggcattttaaggactgttggaaacaggatcattgacactgatacgtgcaaaatcaaagagctttcatgggcttttctgcaactaataaattgagtcttgtcccaggtttgacgcatagtctgtccactatgtctgtgatctacctaatggttattttccaggtcataaaatatatatgattcacacaggtggctggcacaacttccagattgctttcttagctcaagcaatctgtcctagagggaaagcctcttggactgcaatccacattccccaccccaggcaagatattaacttaaaaacaattatcctgatgattctacttatatgtaaataattaaataaattatttaagtgattataattattcttcactggtaatctatcatgcacaacaggaattggaattcatgggggttcccccgctaagattattcagtgtgtgttgtcagtattagatttcccttggccagtccaggcagcttagctagtgatatcacccccatgcatgtccctaaggactctaagccactgcttgccatgccccttgtagattcagccataggtgctgcatctacaataaaaattgatcaagaatatcatgagggtgcccaagggcttcatttgatgccagacgtattactccattcccattgttgtgtgacagcaccccaaatcctctgatgatcatgttaaaggattctgccaagacggtgactccttatcttgcctgctgatttttttgcaaaaagatcccaaagtgcccagcattagcttaaaattcagtggcattcttgccatggcttctggtagaaaactgcttttctgtgaatcaggatctctgaatgctgagagtccagaaacgtgggggatgagaagcccaaatttctcagtgcgtcactgggagagcttgcttttccctttggctttttattctaatgcaagtgtacactcagccttttaaaattttttaaaaattttagatgttttcttcttatccacttttaggatgttgcctcttcctctcaagctctgccagaggtgaaatagttgctgtgtcctgtctctttttggaggggcttgccactcgatggaattcagcaggactttgtaatgttagctctctgggttccagaaaaattacagttttgtcagtgatctgttttttgttgtttatttacagggttagagtgacagcaacattctcttccagctttgtgtagcctacgtataagtagaaccatcaggataattgtttttaagttgatatcttgcctggggtggggaatgtggattgcagtccaagaggctttccctctaggacagattgcttgagcaatctggaagttgtgccagccacctgtgtgaatcatacttatatattttatgacctggaaaataactattaggtagatcacagacatagtggacagactatgagtcaaacctgggacaagactcaatctattatttccagaaaagcccatgaaagctctttgattttgcacgtttcagtgtcaatgaccctgtttccaacagtccttaaaatgcctgtatatggttatccaaagatatgactgttggcacctttgtggaaggactttaatatcattatcatatattcttttcatgatgctacatggttgttcctcctggaaatctgttttttcacttcagcatatgggttccaggtttgaaaactggctcatatcctgaatctcagtaagatatttttggatggtaggtggtggggtggggagtaaacacattctatcttctgatcatccagcatccattcttttgattgtacaccctgaataatactcttggttgactgtctgtctattttactccttggacaccatgttctattaactatctcataactctctaagggtcagtgttcctgcatgtgactacaaccttgacaaacattataattacctctacctggcttataataattggatattaccctatctatcttttcaggattccatcatgtccattgtggtcagtgagcccattccataataccaccttctaccatcagtcttggccttcagaggaacatcaagtctgaacttcttagtgatgtttttcctttcaccaatgtgttccttgtagccttggtaaatggtctatctttagtgcctttgtatgaagtatagtcatctgatgggcattctggctgagaatagtatatttgttcaagcatgcttacttgagccttttaatctccctggcatttctctattacttaatgcaggtccgtgctttattatttcttccaggagctgtctgtattagtcagggttctccagagggacagaactaataggatatatgtatatatgaaagggagtttattagagagaattggctcacactatcaaaagctgaagtcccacgataggccatctgcaagctagggatgaaagaagcaagtagtggctcagtctgagtcccaaagcctcaaagaagggaagctgatagtgcagcctttaccatcttaaagcatgtttacgttgtctttcagtcttcttttaagggcatcaaatcctgtatcccaggatttcctatcctgggatagcaccatcccaggatggtgctatcaaataaataaactatcttatacaacttcatgttctacctttggaatcgagtccttgagtattctctgggctacaagtaggcaaggttttgtagatccttttggttacagtcccttgcttcctgtttcaggtgcaattcattctgcttgggttatgttgtgatttaacccttttattggtttagtggctggaaaggggaggtaagggcagatcttgaggggtgcattttgtctttcaggggagaaaatattgcagcactatccttaacaagggagtaagcattagttcttttttttttttcttttttgagatggagtcttgctgtgttgcccaacactggagtgcagtggtacaatctcggctcactgcaatctgcacctcccaggtacaagtaattctcttgtctcagccttccaagcaactggaaatacaggtgtgagccaccatgcccagctaatttttgtatttttaatagagatggggtttcaccatattggtcaggctggtttcaaactcctgatctcaggtgatccacctgcctcggcctcccaaagtgctgggattacaggcatgagccactgtgcccaaccagcgttagttcttaataggatcagagaagtctggagtttcaagattatattttttcatcccatgtgtctgggtttcaaagtagaactgtaccctggcatagctgacctgctgagatcaagaggccaactgcactctgtaactcttaggattaagtcctggacctcatctttttttttttttttttttttttttgagacggagtctcgctctgtcgcccaggctggagtgcagtggcgggatctcggctcactgcaagctccgcctcccgggttcacgccattctcctgcctcagcctcccaagtagctgggactacaggcgcccgccactacgcccggctaattttttgtatttttcatagagacggggtttcaccgttttagccgggatggcctcgatctcctgacctcgtgatccgcccgcctcggcctcccaaagtgctgggattacaggcgtgagccaccgcgcctggcctcatctttagttttctctgctatcaagctgtaggagatgacagtatttttgtatattaccgagaaggttatctggctttcactcatagcttttaatgattcattaattgtgaccaatcttttgttaacatttaacaagcattaatggagtttagcattagctacccaatttactatccttagagttactattttccctgtattgcacaaactctggatatataacaccagcatttatttttacaatttaccatcagtacaagagaaagatttaataattatacttatattatatcccagaggctattttttgctgaagctccaacaacccaggatgggattctcattgccagctccaaatctccattgccaaaataccgtggcagtacctgcttatgtggaccagtactggcaccaactgtcacaggttgcgttgcttaggaggcagaccctgtgatagagattattatgtcgggagttctcagggacagttctcaggatcaccacttgtgaaaaggaaggggaggaagcaggtgtgagaagaggaatttattgggattcagtgtagtttcagtgtgggtcttagacaaatctgaaaccctgatgctaggatgatccatcagagatgtctcatgttggttggaaggagctacgcccttatatacccttctagaccagtcattagatgctggctacccacaggaagtgggtttggcgatggatgaggcagcttttcagccaagagagctgacagctgaagtctttcagtgaacagccttcccagaatctgggaataaattattcagtcttgaggttggaactgggcagaccatcaaagcatcctctaaaaaacaccatggaaaaaactctagtagtagtaccccttccccctcccccacgccacccaacccctctccatatttataggggcagtagaggcagggaacatctaagatactgtataggaaaagaaatctgcccttaaatgtaatgctatgcctagatacatttacaaacaatttctgccagctgtttaaggaaaaaataattctaacttatacaaattgtctgaatgactaaaaaagaaataatgtcttccagctcattttataaggtgaatataactttgatactataactggacaatgaaaataaaagaaaaaatattatgggttagatctcttataaagctaaatgctaaaatccaaaatgggaactaaggggtttctttgacttgataaagtaactgctagaatcttttagctaaaaccatagtcaatgggaaactattagaagcctctttagaagttgtaagatgaccaggcatggtggatcatgcctgtaatctcagcactttgggaggctgaggcgggtggatcacatgaggtcaggagttcgagaccagcctggccagtatgctgaaaccccgtctctactaaaaatacaaaacttagctgggcgtggtggtgtgcacctgtaatcccggctactcaggaggctgagacaggagaattgctggaatccgggaggtagaggttgcagtaagctcagaacatactactgcacagcctgggtaacagagtgagattccatctcaaaaaaaaaaaaaaaaaaaaaaaagattataaggcgaggattcctgccatcactacttatattcagtattatggtttggattctagcatttagctaaaacacacatacacacacagagcaactgaaaagaatgaatatgacactactttcagatggtaaaagtgacttcacaggaaatgcaagagatctattggagccaatggaaatgttcaggatatctgatgaatacaggatcaaagtataacaattcttttattatatacaaggaacacttagaaaatatagtttaaaatgttaatatttgttaaagaaatacagtctgaaagtttacctagaaataaacttaacaaggcatacgttaggaagaaacttacattccctttatgggaagatgtaaataaaaccaaaataagttgaactatgatctttaaaatgacaattattcttatattaatttacatagacaatgcaattctaatcaaggtctcattgggtttttcttgtagcttgactgtctgcttctaaaatttatatagaaaatcatattgctaagaaaaacagaaaatttgataacataggtatgggactaattctattagatataaagattcatataaagtgattgttaccaacatagtaggatattaaagctatacaccaatgaaacagaataaaaggcttagatatatgacagagacagtatttaaaatatttggaaaagggatagaggttctttacatggaactgggacagtttgttatccatgtagatcaagcatgtccaacccatggcctctgggctgtgtgcagcccaggatggctttggatgcagcccaacacaaaatcgtatactttttaaaaacattatgcggtttttttgtatttttcttctctttagctcatcatctatagttagtgttagcgtattttatgtgtgacccaagacagttcttccagtgtggcccagggaagccaaaagattggatacccctgaatgaagagatatttaatctttaactataacaaaagaaaaaaataggttaatgtggactaaagacataaatgttagaagttagattttagaagttttaggaaatataggcgatatggttggctctgtgtccccacccaaatctcatcttgaattgtaatctccacaatctccacatgtcgagggcagaacctggtgggaggtgattggatcatggggggcagtttcccccatgctgaaagtttactgagtgagttcttgtgagagtgagttagttcttatgagatctgatggttttataaatgtttgactgttcctcctgcacacactctctcgcctgcctccatgtaagatgtgcttgctttcccttctaccatgattgtaagtttcctgaggcctctccaatcgtgtggatcagtgagtcaatcaaacctctttcctttataaattacccagtcatgaatatttctttatagcagtgtgaaaatggactaatagaatagtcaactatttttatggtctcaggaaaagatatgttgcttaaattggactcagaagcccaaaatctaaaggagaaatggttataaaatttattgcactaaattaaatacatttatttaagttgaatgcactaaataaactacatccagtgtaactcaaaacctgtacttggaaaagcttcttcaatgagagaaaattaatatctagcaatacttataatcaataagcataagacaaatcttacaaagaaaatacatcccaaaggaaaggaataggtcgttcacaaaagaggaaggattcccaaaacgtaaatacaaatgtccttctcactagttatgaggtaatgtgttgtttaaaatacatttctgtatatatatgtttgcaaaatagatgagttgatttcctagcatcctctaattgtatttttagtgttactatgaactaatgggtttaaacatatttgataatgtgtttcaatccaatcaattattctctttattgatattcatgttatcctaatttaggccagcaggagcttacacaatttttcctaactcttttaacagaacactttcatatttagaagccttattgctttctggtattacaatagccaaggcttattttactcagattctgcctcaaccctgaaatcatttttttccaaaaagctctgatttttttattggggagttttttgggtgccagtggtttttattaccactgtgttggttgttcattgtttccaggttttttttattagtgagaaagaggaaatatatatacatacaattcttagttataaaattaattataattttatatagataattccagttcatttttggggtccaaagcttttaattaacctccccaatttcagaatcagccttcttcaaacatagtaaaaatgtgggttcttaaagataacagtttttgctttttacactttatcttataatacatacacaatctcaaaataatatcaccatcactgcctaccaccaataatatgattattgaaaagtttactttttaaaattcttttgcttttaggatacatttcaatgaggatatatatatttaagttgctgttttttgtttttgtttgtttgtttccaaagaacttcggatggtttctgtctttgtggctatgccaccaaatatgtgcatacgttcatttgtttctttgcattaagttgtaaattggattctgcaaaactctctcccaattttagctgttctcaggttggtctgctgtgctttccaatgagtatcttgtcagtgattttgacatattcctgtccccctgcccatcagaaacctagttgtcatcctttatttccttactcatgtgctgtttactgtgtggttcttgtagctgttttcacagcagaagagttgtaaaatagtttgttcccatccacttgtatttgaaagtttgaggtgatactttgtaacctagatctatgctatatattgtccaagggtctttggggttttctttaactggttgttctgtgtttttttatagcaggatcagagaatattccattattacgtggctattgctgctgccattattactctgtattcaaattctaggcaatttctaaaaaaggtgtatacatgcatatcctatgacccactgattgactacctaggtatatatcctagacaagtcttgtgcaatacatggtgtttactagagcattgtttgtattagggaaaagtttgatgctatgtaaatttatattaatagaaaaagatacaaataaatgttatattcgtataaaagactaacttagaagttaagaaaagctgtagtcaaatgtgtgtaacaaacattatatattaaatattatgcaaaatcatacagatgaaaaagaaaacagtttaatgatatttatataataaaaattattaagcaaaaagaagtactatacttttccacagatacatatgagtttggaagaatagaaacatgtacaggagtgacaaatactatatttgtgatactggttactctgagagaacatggggtcatggtaattagaagggaaacatagataaggtaagaactattctaataataaagatctgaaataaaaaatttgccaggcatggtgctgtgcgcctgtactcctagttactcaggaggctgaggcaggagaatttcttgagcccaaggaatttgaggctttcagtgagctatgattgcattgttgcactcaagcctgggtggcaaggcaaaaccccatctctacataaatgaacaaataaataaacaaagatttgaggcaaattttgcaagctgttcagatttttgcaaaactccgtggtgaatatgcttttctatacagttgaaatacatcatgatttctaaatagagagggagaaccagtcttgttgactgactgtattaacatggataatgaacgtgacaatcagaaaggttttggttagatgtgaaaaccagggtaaaacgacagtttcagaggcaaatgttgcaagtgcctatccaaaccgtatccatgttatcattaaacattggaagcatataagtaatcttccttgttctggctccatgtttaacaagcactcttccgagcatggtttttcttcacatgtttttatttatattgagaatatgttgggcagacactctgagtgtccagtccccttatgttcttactgtgagctggcactttattttcatgatagcaatctcatatgcgctgtctcagggatgtctgtatttccaagtgtaatggattcaggaacatgggcaagaccaagtttctgactctgcaaggctcaacccagaccttaaattcatcaaaagtttgcatctccccaggaacatccttctattctctatagcatattcttcttgaatttaaattagtgatctcttgtgaagtagaaaattaatggctgttgcaggcatagcctaagaaaataaagtaattcaaacgtgcagccaattgtagtgataagctctcattcagaaataactcagagttgtatgtagttagcaccaaatgtacagaactggtaaaactagacaccttgtgagcagttgctatggtaatatgattaattttggcagagaagtctatttttaatattcaaagtagccttcaaatacctgagcctactggaattttttaaatggtaaatagaaggcaaaatagtccatttaaaatggactttaagttgttaagagagcctacttgatgttgttagttattaatctctaagggacattgccttatttttgaattcctattgcctagcacaatatcagacacaaaatataagttcaatacattataatgataattaaattgtctcaatgtctgagtaaaataaaatgttttaaacagttttttaaaaattctgttctttttggagggcttcattttagacattggtttgttctgtaagcctccatggcttcattaaagtgacttagtataaatgagctctttatgaaattttaggcccaattggtgaactactgtatttctaaaattttgcacatgagagagtaaccaatataattatctgaaactcagttaataacagcagcagatgataattgccttcttcctctatagagtttttttcccccatggttcttcttgttttactgaaaaggaggttatctttcagttaaccagatagttcaatagattttgacactcactccccaagagacagtgattactgaaatgttttggatgttatattgttacaagcaaaataaaatgcacagaaacctgtggattttttgtttgttttccaaagattacaaaaggattccttcaacaatcttttgctgtgaataatttaagtggaaaattaaagttctatcttgagtccaagatttacagagttgataagctttgagtcaaagtatgaattttaaattagttaatcagtaatgctgcagggagattggaggtttggatgggccaaatttccaatttatatctactagctaaaacttatgtcagttctaaatatgtaaattttaaaaggacataccaaggaccgtgatttgcagttatttataaagattttatttacttagtattcatgtgtatatggattccaacatctttttcctttattatctcaaacaagctttgaaacaacactggcggattacttaacattgaaattacacctagaacatgggcatagccctgggtggttttgttgctaccaggatgcaaattatgatgaactccattttcctttagtaaatgttttctttgcagattgctttcatttttcaataaagtgtatcatctctgtgtgccattgcaggcaccatccctgtttctgcaaacccgaaaagaaaagaatcatctatttcttcattccctatatgagattttgcagtggttaagatggatcatcagcatgatttcaaagggaaactcttagacaaacgatgtttctgacgcggaataattttgctttaagaaatgacctgtctgttatcagtgctaacagactctgctatattaagcaaagtgtagacgccaaataatgtgattgatagacaataagagaatgggaagttttttcaaatgtaaattatgtcagcaagttaatagtattaattaatatcacttaattatctgtggctcaaatagaataatgtcagggagggtgccttattaatattaaacatcatgcatttaatagcaatatgtgttactgacactatgaaacttctaaagctgtaaaacattacaaataatattgagaggaatatttcatagatcttcaattttgtgcttgttttagagtgagtaaaattatctttaaatattcttcccattgtttaaggtctctaagactatgaaaagaagaaatagaaatcaatatattaagtcaagtttcagagagtcagtgagtttttaaattttgggaagtttatttcgctgaggccatgttgttttatggctgtgcagtgtgaggtattaaccaaagagaaaggactccggactttgatttgtgccaaaagggaagtcttttacaaagaataataataaccagaaaggttgtagtacagtttttctcaacctatcataaaaatagactaaataaaaatgcagaaaagtgggaaaaaagattcttgtgtttgtgtgaagaaatgaccttccagtgggtaagccatagagcaatgtatgtaaaaaaaaaaaaaaagcaaatttgcatgaactgtcttacttccagaaagagatcaagatttactccaagacctagtgtcaatatttagaaaataaggaaacttaattcaaaaagacgtatcagggttgactcccaccctggccacaaacgtaaacaattacaggcataagggaagaaaaaacaaatgtttgccctgtccttacaaaatatatgacgtgggaaatataaataaactaaatcttgctagtggttgattgtatacttaatatttgagcagtgtaagaatggaagtttttttaaaacttctgaactacaataatttattttcttaaagctcaggagagaaaatattaggccatacacacaaaaaagtttcaatatttacttttacgtttctggatcaaagcacttttctgtcaatgttttctcttttgagacaaagagttcagaatgaatatttgtggtatggatgatattttaaaaatgtcctgagaaatcctatccgcagacattgtgggctataagtgcagattgatatgatatttcaatggatcttttgttaggggaacaattttgttttctgacctaaatagaaagatatgtttatttggaaatttagcatttaatcatttccataatgtaaaattacgttaaaacagaaaaggattgaaaaaggcaacatgctgcttgtgtctaagttcagaatggattgatcaattttgattcatcttgaaactaacaaacatcatgaaaaatgtctttattatcaaatattttcatattctggcggaagagtccttgtactaacagaatgtgtctgtatctgtatatgtatatagatttgtttgtcttacacttcagattcacatctgattgtgtattgagattatattctatttcctgatttaaaaagtaattgaagaagactgtgtttaacttgaggagaagttctatgccctttgaaggaacttctaaatttgaagtatgtttggacagtttctttctttatttttttcttcctagagtcaattatccaaagtctagctttcttatatagtactcctaccatctttcaaaaaatctacactgggtgaagacatactgttttcaaatggccaggtaaaaatcaggttacctagatgctccttccaatccagtgtgcgaggaaaggatgagtgaacaattttatttaactcattaatagtactttactgcaagcacactttttaattgtagattagatgattttgttgattttatatggtagtgtatggtaaaagtggaaaagtagattttgaaaaaaatgataatgttttaaataaaacattgcatgggatgcctttgtatgaacaaacactaaaataatggactgcagatacttccttttctattattaggaatttaacaaagacacatactaccttaaaacatgtctttttctgaagaatgtttctgattctatataaaatatgtttgtatttatttttctattgtatcaagagcttttaacatttttgataattgtttctcaaatttggaatttgtgataactttgtgtgtcatgttgggggagatttattctatgcacatgaaatgctaccagaaaattattttctcttttaactggtgtaacattagctaaaatatatgtcttagaacttttgccaagtcttacttttccttgggaatttgctcagtggttgtcaatcatgtaaaaatagttgacttttgagacttcactgttgcctttgtctgagaaaattttcattatgccttcattgtgagcaagaccggtcagagcagccttttcagaccttcacatgacatcatctttcctccctaaatccaatatcaataaaagcagaaagcttaaactgtatatggaaaaagtgtaatgaacaaatgctcttggctattgttgaatctttgagctatctcttccaatcccataaatctcaagataatgaatcttctagctcaatcatgtatttcctgggcatataagtgtggtgtttggagaaaaggggacacaattcctataattacacttaataatatatgtcactaaaatcaaaaaggcacctgtcttttaattgctttaaaaatgtttataacagtaaccactagagattgaggggcttgtaaatatttattcttggaatagttaaatatttagtattttggttcttaaagcaaatttgtcaaataggtagcacaagcagcctcataaactcttatatggactcttttgttatacacaacttatactccaattcacggtatgttctcattcacatttttgtgcctcaaaatgtgtatattgaagacctatttatttctggtactatggcattaaggatattaaggtgagcaatacatacttcctgttgttagtattttcaaaattagtcgaggaagccggctgaaaacaattatgaaatcttgtgtgttgccttattattggcagaagcacagtcaggacatggaagtagagacacttaattagggcaaatgggaagagcaggtttctaggaaggtttttctgggaaggcctaaagagactcaattttcttgtcagtgtgctctcgactggtaaccagctatcagatatcttagtgttaattcaaataaatgtattcattttcttgaggatatttggtttccaagtattttctcctgagtggacagaaagacttcacccttggcaaaagtagtggttctttactttgtgtaaccccttttgacaatctactgtggacttgtcccagaaaaatacatggtgtttgtgtttataaattcgtacatatttttgcatatagtttttcagaaatcacaaacttaaagcctccttaaagctgacggcctcagcttcagactgaagtgttagagctcactgaggaattggggacatgggtggaagtggcattttttaaagttaaggcctagggaatcacaatcttgaattgcttattctcatcatacattattttataaaatgcacttattctgcatactataataaaagcagtctttctgttttagtctctgattaaaaaaatgtttgttgtgcattaacggcaaataacctttaggagaaaaacaaaacctgtggttttccctgtagcttaaaaattgttctctctgacatttaattttggcttactggttagctccaaccccctatttgaccataagaatccaagcagaattccaaacagatagtaaatattctaattgcacttgagtattttcctagtatcgtcccaataaccattttcccattttttttttagttctgatctcactaacctcaaatcatgtattaaatgggccaaatgaacgataattcatactttaagactgtttatctccaactttgttttttgaggtaaaataaatagaaaataccacataaaaacgaaaacaaaattccaaagtggattcgagaatttcatatgtatttttgcacctaagtgtcagatatatattagattataatgcatcctaatacatatgagtataaattgtcatggtccaacttactgtgccaacgcataagtaaaatattttagtacacagaaataggacacagatttaaatagaaggcgaattacggaaatcttcaaatgtgtgcagtatgaagaaagaaatgcattttaaactgtatgacaggttgaaagttctaacgtgcctttttttttctgttgagaatatcaagatttaaagatgtatatgggctacagtgtgtcaagtctggccgtaaatgaattggcttagtcactcactattgctttctctcaaagaaatatttggttttctcctaaagcaatttatggtgtattcatcactaccaaactattctgaagttattagtttagaaaatatggcaataaataaatgggcttatgtcctccagaactgttttttctcctttaagtatcatctagcctggtgccctttcttctccccagaagtaatgtttttgcttctgtgaagtgacttatccttggactgttgatctgtgtttgatataatccatcaagacatggatcctactgcatataaaaagccattacaagaaaataaaatctgaaacatatttgaattttattttatgtgtactgcttttatctgaaatgcagtattgacaaagtacattttgcttagttgagtgcctccgttttcaagtcaaccatctgactcaaagaagagtgggaatttattcttgcagaaaaaattaatactaataaagatgatgacaatgataatcatttgtagtgattgggagcttgttaaaaatgtagaatctgaggctcctctccagacttaccaaatcagagtctgcactttggccagattctctatgattcttatgcaaattaaagttagtgaagcactgcttcagtgtctagtggccaccacactaccagcactaagaaaggaagagacaggctgagagtccctgccagtggatgatcagagctatttgcattgtaaatgcacctgatggaagtttcatataactagtcaacttggatttaccttacagtcttaaaaagtgtaaaatgtatttttatgaaaaccaacaagccttatattataattggcaaaatatttaacttgggtaagtttcttgcgggggtctggctttagggatgctggagcattagtgttttctgctgcgtctgtacgaagctgattagaatctcgattcaatttcaggcatcaaaaccaccctcttagctagtgttataaactattctgtacactctttgtggctttgctgctatgagagtaaacgaaagtaagcatttctttgcttctttagactgcctttccattggaaatagggccagtgaggggtttaagagagaaatctaattatagtaaagatttttctatatgttgaagtgataacctacattttactaatttctattttcttcctttctagattcccacataaatctaaccccttccttcttatctcatgtcagttttgcactgggtaaataattttatatgataaacctttgatcaaagcctaaaacattgcacagcttttaggactgaagtttaaacttcataaataactaattctctatagtggaaaagttcataaatattaagatttaaatccaatgaaagacagtaatttgaaaagcatggattttgtcactttctacgattttaatgtattttctttcttttccttttggtttcacagaagaaaatctgaagaaaggtttaaaaataaagaaaattggtaaacctgtaaaaaacaaatatccctgtatttctaggtatttttcagtgttctactgtctcatgattaatttcttatttctcgagttttttgtgcttcctaaagttactgtgctttgactctggcagtactaagggattggttggtgtagcttgtattcaaataagcagggagactattttattgttacactaatatatatgacgaactttaaaagagaaattcacatactagttatcaatgaactctcccatggtttcacaatggtttatagagctttgctttattaagtagcataatacactaggtaaaaaagatagagtcagactgagagcagttgctcactcctgcaatcccagcattttgggaggctgaggcaggagtattgctggaggccaggagttcattatcagcctgggcaacatggcacaaccctttctgtacaaaaaatacaaaaattaacaggcattacaaaaattagcccagcgcagtggagtgtgtctgtagtcgcagctacttgggaagctgaggtaggaggactactagagtctgggaggttcaggttaagtctacagtgagccgtgatcgcaccactgcactccagcctgggtaacagagagaccctaactcaaaaataataaaaataataataatagagtcagagtgttttcaggttttagggtaatgacttggtggctcttgaaaatatggaccgtgttatatttgtcattaaagataaaaaatctggcatctagttgttgcctaaataaatattgacttaagtattacttttggtagttatatatccattttacagagactcagaggcaatgccatcttaagataaagtgtattataaattgtatgaaatgtggtgaatgaattgctacaatagcactaggtattcttttgtcttgattgcaccttgcattataaaattatcttagtttataaaatatcacatggtttagttgttactgcttttcctttttcctctcagtgaagacctgctgctggtcataagaatccacagaagatgcagacattcttatccgattttcagatatttgcgaattagctcatgattgcctatttctctttatttagaatctccataatcagtaaccttcttattcaaggaaactactttccccctctccacaagcaacaatgtaaaaaaatggagttatgcccttttacaggtagctaatatttgtcctgtaacaggtccagtgcattcagttatgattactttctgaaagatctgtctctatccagaccacgtttccatatttttaacaatgcttttctaattagctttgtgtgtattgatttcacggaaatattttacattttaattcaacttttctttttttagctgtattttggggcgatattgccttagatgatgaagacttaaatatctttcaaatagataggacaattgaccttacgcagaacccctttggaaaccttggacataccacaggtatggttgattgtttcagaaaatttgtctttattttggagaaaatatactcttgaagtgctataaatatttttggatcatttttcatctcctgttgatcaactctgacttcctatacacaaatatacatatttagaaatgcaggttttattcatagttttcattttattaatttttttttttttttaccaaacaggttgtagtatttgctacatactaggtctggtttaagtgctttgcaggtattaattctctgaatcttcatgacaaccccctcagggtagttactaatattactatgattttagaaatcagcagattgagatttagaaggctatacagctttcttatcgtcacatcatcaggaagtggccatgtcagaaccagaattcaattctgaaaaaagcttgattttgtcctcttgagtattatattaagttgcctctcatttggatattgagttgcaaaatgtaaattattcttagagaaattatataggaaatgtatttgaaattatataggaataatatttggaaaatttatatatctatataatttttgtaaaaaccccagaaggcaattttaattttagttgatttaaacatgtttgaattatgcctgtaagaaacttgatatatgtaaaagattatttcagttctcatttaacaattttttaaattaaaatttcaaaattctttgtagtatcttggtaaaatttttatctgtgtattattctggagaaaattgcaaggttagaaagttaaaatctctttctctaattatattaatagctaaaatatttatttcatgtcatgcttttgatttcattgcattctccctttttagtatttttattttctcctattctgtggaagtacaatatgtggtcctttctgatatcaaatgcacatatatattatggacttaagactttttactgtgactttttactttgcccaatttactttttttgccactttttactatgaccagttttaaatatatcgaaatatttctacctattagattgtagaatagtggtattcttacttgttagattcagcagtttttaacagtttatgattttcactgaatgtgtgtgtgtgttgtgtgtgtgtgcatacatgcatacgtgtgtttaaaacaaatttgaagtcaactgcagaaaacgcactttaatattattaggtagtctagcatgtactttgtaagaataaggatattattctatataatcaaaataccactatcagatataaaaatttatttaaagtagggagtatgtaagagaaagcctaaggaattcatctaaaataataacaccatgtaaaaatagggtgctttggtgtttgttatgcatagtgacaatcttttctaaaacatatatcagtatgggtgctaatattgctgtgcagtgtcaccacagatagcgtatccctctagattatgtttcttggccaaatctccagttgctatatcacctgtaacactgtcatggagacaacgcattctggacagtagagcaatgatacaacaataaaatgctagagttattataagttgcatttccaacttttattaaaattttcattagctctaagctttagatcacttctttgacctcccttctcccattattttgaaggcattgattttctgtgattttaaatttttaaaatgttgttatttaatttaattttatttattgttaaactctgagaccataataattggaagaaaaatagtgttattttagacatagaataaaacagatcatactgataataataaaaacacttattctaaatttttctgtggaaggtacatgtttgaaagttcaatagtaacttgcactactcagttgaattgcaaacaatgtaatataaatatagttgttacataatggtcatttcaaacatcattgatgccatacttttaaaatgtttctcctaattgcttaggaatgaatgtatttaagtattacctcatctttctaaaatgtgcaatgaaaaaatttcaaaaatgtttctcaagatgcacagcaaaaatgtggccatgtaatggaagtaattaagtagattattagtcagtgaacaagcactctaacttatttgccttataaggacttatttgatttttcccttaagaggcttatatagcaatagattttatcatttttttttagcttcagtctaggtaattaggtgcatcacaattttaaataaaaaaatagatattggaaggaaatagttcaagtgatttgtgaatagttcaagttgtcgtcgtggaattatagctttctttgtcttagcccaaagatactctatgaaccatagatactccatgttactacaaattcataggcacttgttaagatgtcattagtggctgtattggttgtttgctgaatgataactttttcctatttgtctaataaaaattcaaggagaatagagaaaataggtgacaaaaccgagagtagcattttataaaagccctggaatgaaaatctggagacttgaattattgccaaatgctatgctttctgacttatgacaggaatctaccttttctaggttttgttggtaaaattgcaagaacacatattgccttattcctaccgtttcctattccttttgcactacagactttttttacactctgttttttataaatttttcaaattacacagcgtaacagaatatattttgcagctgaacattcgtttggattcctgtggctttttccaaattacgtttttgatttctataaattcaactaaattttcaaaatgcagttgaatatattgttaaaatgtgatatgctttaaaaagtttttgaaattcatggaagctttggaagaaaacatgcattacacatttgctcttctaatgtttttatttccatttgctgatttggcctccgaaaatattcagtttgcactggggaaatagctggcatgcaatcaacagggcagaacaacttgctgtcattctatgtagcactatgtgatgtcaaggtcacagtaaagaaaaatgtttcaaattatcaatagatgactcaattgtcatgatgtccaaataaagttatttacattgctctctgagtctccccatccccttattttagttaccaacattggttgctgtagagtttttacccccttcaaagattcatggatattcataatttcaacactttaagaccacataaaaaatgaccaaagagaaatcattgttgcctatgactgttttttatttgcaagaactttaacatattttgagtttaacttgtttccttttattctttaaggtggacttggagaccatgctatgtcaaagaagcgaggggccctctaccaacttatagacaggataagaagaattggctttggtatatcaatgtttaaagttgcagacgcttgacttgatgtacagtaaatattatactcatagcagttcagtttattaaaatcagtgtgccattatgatgtgaagtatgtaaatgatatattctaaaactttttattttgctagctcatatctgatcaaagccttttagaactcatttggaataatttgaaatgttcctttaatttattttaagcttctctttatttaaacatgtatcaggtgtttattttattattgatacttatttccaggcaattcagcatcacaccaaggtatttttataaagcctggatcaattttaatcaagtgaaaaaatatcatggttatttgttttgaaataaatctacttaaagtaaaatgaaaaacttattaccggatttaaaaagttaaaatgttttgaccattcaaaaaatagaaaatagttataaatatatataaacattcagaactaattatgcctctggctcataattagttaatatttacagtattgaatgtattaaaaattatttgtagattttagaggtttgtttaaaatcctgtatgcatagctcatattctaacgttccttaaattgatggattactaattaaatgcttgaagtacatatttccaaggaataattttcccaagcaaaagtgctttgctccaggctattgaaaagacagacatgttagagacagagtccctatttgttgtgtcaaagtatacaccagtggcaggatattcatattgacagtgatagataagaaagaataatcatgtaaatttaggagaaacaaaaacagcaacaaaaatattatgaaaggccattaagaaaaggaaaagactatagacttgaaagctgctccagaatagaatgcattttgttcgtgttgtgtactgacctctaaatcatgctgcattccttaatatgaatactgaggaaactggaatggagatagcttgttgtacgggaggctgagaccatatttgtcttaatgttacttcatttactacctgtataatatagtattcttaattttagactgtactgtggaatatcagttcagatttgaaggattaggaaactagcaggagtaacaagaatcttaaatatcatgggactttattaaacaatatttgttttaactgttggtgaattgatagtgactagcaagacatgaaacagaaaacaaattttctgtggcctataagcctgactgacttctatccactttaggctgttgtatggatatccaacaaaattcactcacagaacattaagatatagtattttgacatgaaatacttcaatattttaatgcttttgttcaagtatgtaatataactgaagtttttctttaatgcattttgacttctggcatttatacaaaaaatatgtaaataagacattttaacttttgtcctttaagaggtaaatgattccctgaccaagaacttctgtttcacagaatgttttaaatgtcactgcaggcttggagcaaaacaacacagttaagggaaaagtacctctacaattctcagggcaaaatgagaaaaatcgagttcccagagccgctacatcaagaacggaaagaatatggcctggaggcgttattccttatgttataggaggaaacttcactggtaagatactcccagcatgtctgttttcataaagaaataaaaactatcatacagattaagtgtctatttttatagaatattaacataagatacatagtattaagtcaaggttggaaaactacttcattaacttaggttattagtgtagagtgtctttgaaattgaaagcatatctttggtattgtgttctaagagtttaaagcactgttctggtttttaaacagagtttcagatgtgcctattaaatttggaagctgatctctttcaactgacaggaagaatgtatgcctcatttatagagccttgtagacacatatttgtagagatagtgagctttagccctctgattataaagtgagtgtccgttcttaacaatgactcatttgtggtgccataaactagtattctttggttgatgatagtggtggcattctgcactgctcagccagacttagggtagaggatgcagcaagaagcattcttcctggggatgccaccttttcattaacatcacacattttttctaggcagccagagagccatgttcaagcaggccatgaggcactgggaaaagcacacatgtgtgactttcatagaaagaagtgatgaagagagttacattgtattcacctataggccttgtgggtaagtagaactaggtagggactgacttaaggaaaaaaaaaattaaaaggaaaacaattaaatgtccataggtaagatttatttcttaagatttgctttgtattttggccatgagaaagtctggattttccataaaaatattatatactaggtatgtgtattctttgatcacagtcctctgtgcatctactgcaagtgtattcttttctaccacctcagttactttctaacaatgacattaccaacatcccactcacctgagctagaaacttcagtatagtcaactagggattctgttgtgttgtctctaaaatagtgcagtaagtttttattgatagtcactgtatcttttgatttcaacttctattccatgtcaatgccctagttcattcacgtatttatcatctcacacctggtctgtttatacatcattaacctagatatttttggatagttccataaatttttagttatgacttattcagcagtgtttccttctaaattaactttggcttgatatgttttggttacatttgaaatacttcctccatcttatctatttaatatttaagagatacaaatctaggctatccttgtatctttctgcttatctaataggaaaggatataaactcatcttgcatatttctaaatccataatctattcagatcagtacatctttcctccttcccacatatcaattttgtaaaacacatccaaagttctgatcacttattattttattgcctaatatctgttttcaataaatttatatttatataaattatctttttttaataatctcccatttcacgtgttttatcctgccaaactgtttttcctcattcactatcacatcttcatgtttttgctcatgatagttttgatgcttggaatgcctttaccttccttttcttatcagtggaaatctttcacatctttcattcttacccattcctgagctgcccacattgggattttgctcctacccatagctgtaatcataatattaccacagtttatccaaatgtctgtctttctcaatgatgaggatggttaagttacctctgtgtccctcatgatacccagcccactactttacacgtaggcgatcaagaaagtactgacaatttaaacatcaactaaggagccgggcacggtggctcacgcctgtaatcccagcactttaagaggccgaggcagatggataacttgaggtcaggagttcgagaccagtctggccaatatggtgaaaccctgtctctactaaaaatacaaaaattagccaggtgtgttggcgcgcacctgtaatcaggaggctaaggcaggagaatagctggaacctgggaggcagaggttgcagtgagccgagattacgccactgcactccagcctgtgcaacagaggaagactccatctcaaaataaataaataaacaaacaaacaaacaaacattatgtaagtacattgtgcatattcctcacacacaataaaagaatgttaagaatttttcttttacgttagaagattgtgagactttcaggggatatttaaggacatgtatttcaattattttagaaatgtgaaaactaaatgtagttgcactcttgaagttagccccttgagtattaatatatacatatatagtattaattaatatatacatctatatatataattcatataatgtgatatgtatatattaatatttatttgtacatgcatatacatatgtgtgttaatatatacctatatttgtgatttttatagtagtaatgcagtaatgctgaattttggtaatttatcttgctactcattttacagttcaaacttttctctgtgttgtgtttttggtgctaggaaggatgatacttgtataggaattgatcactgactggcaaagcattataatcattctaacttcatttggaattaccattgttgacacaatttcataaaacatcatatttcatgatgatttttctatgataatgcttcacttaaatctcataaaaattcatttaaattattaaagagcttggtagttggtgtgcacaaagtacttcagctcaactagaataagatacttgtcaagtcaagcacattagcactcctatggggcttcaatattgggtctttcatctcataaaaaaagacaacagtgtggcaataaatgtgtagcatttaacaatatctagtgtaattgttcattgagaacctgcaaggtagtgtcattgatattgatggaacataaatcaattctatttctaactttaatctaataagaaacacatcttaccatcactttcatttagctctcccacaaagttaggcaactggtaactcttgcgattttttaaaataagagctaaaataatcttgcccatatttataggaaggactattatgcatgaaactacctgtgtcttttagaacattaactattgtttcccaccttattctactatagtcagctcttattcatttaacatttattggtaacttttctgtatcaggcctttagtagatgggaaaataataaaatataataagcaaaaggtggaggtcaggactttttgccacttagcttcagtgcatttcctccttaaattgtattataagtacagtttatgtatgactgcaagcatatttgtatatataggcacatgcatgtttctaaatatatgatctctttgattcatcttcagtgggacatatgctttaaccctcacccttatattggtaaaaggtttgaactgagctataagtattttatttacatttgcatttagtacaacagtatgagagaactctggttgtagctgattagcaggctgctcatcagactttctcagctacttatccttatagagacaggtaagagaggaggttctctaactgccttcttatttcttcttttccttatttttttcttcaacgaagtatttttcagtgaacagttattgtcatcagtggcatttatttattttgcaagatgattgattattattagcaaaatgtgagattattttatgatagagattgatttcattctttgtgagagatttatataactatgtttattacctcagtctattatgtagccttttatagctaaatagattctatttacatgacttctctccttttattagataatttttgtggaacaatcttactttttttaatctacttatctttaatgattgccaaaaaagtaaataaacaaaaaaattacagttaacctgtttcactaatctttaaattttatgattaaatggtatttaactttggtctatttgattattcaggttataaaagtagatacttttgagccggacgcggtggctcatgcctgtaatcccagcactttgggaggccgaggcgggcggatcacgaggtcaggagctcaagaccatcctggctaacatggtgaaaccccgtctctactaaaaatacaaaaaaaaaattagccgggcgtggtggcgggtgcttgtagtcccagctactcgggaggctgaggcaggagaatggcgtgaacctgggaggcggagcttgcagtgagccgagattgcaccactgcactccagcctgggggacagagcaagactctgtcttcaaaaaaaaaaaaagtagacactttttcatcctatacttgttgaattctcattttgtcccacttaacatactaagttttgggaatgtagagttgaacataaggtgttttctctcctcaagaaggttatatagttaggcagtacgggtgtgctagccaggattcttctttgcgaacaacagagactggctaacttaagcagaaaaaacgatttattagaaggtcctcgtctccatttgagaccacctcagcctggactttgttgtccatatcactatcagcattttgatcaaaaccattcaacaagtctctaggaagttctaaacttttccacatctttctgtcttctgatccctccaaactgtaccaaccactgcccgttacccagttccaaagttgcttccacattttcaggtatttttatagcagtgctccactcccagtactaattttttgtattagtctgttttcacactgctataaagaactacctgagactgggtaatttataaagaaaaaaggtttaatttattcacagttctgcatggctgagtaggccaaaggaaacttacaatcatggtagaaggcaaacgagaaagcaagtaccttctccacaaggcagcaggagagagagagagtgcaggggaaactgtcacttttagaccatcagatttcgtgagaactcccttattatcacgagaacagcacaggggagaccacccccctgatccaatcacttcccaccagctcggtccctcgacatgtggggattacaatttgagatgagatttgggttgggacacagagtcaaaccatatcagccacaaagtccagctaatttttgtattttttttttttttgtaaaaatgaggtttcaccatgttgcccaggctggtctcaaactcttgggctcaagtgatccacctgcctcagcctcccaaatttctaggattacaagcatgagccaccatgctcagccctggaaaacttattaaatcaaaacaaaaaagaaactgagttattttaatgaaaaggtaaatggcgattaacctaaataattgaaactatttcaaatacagcacataaaaaggcagaaccagttccaccttcatggataatctaatagattagcttccaaaggggttttgttccaaaagggtttggtctaccaaataatgttccaaatgggttttgttctaccaaaccaaggcaaaagtaggaagtagcagattttgatttacctgattaccatctatgacttatggagaggtgaggcttttctgttgatagggaaagtttttgctcgatgctacaggtagaccttaaaatgtccaaactttaaaagtggcacacaaatgagaaacaaaaatccaacagccgtatacaagaaaacagcatcaaacctggatgacattagaaactaagataatatttagacattttaaaatcacattaaaaatacatattacccttgtctttccatgactaatatttgtctaagcatatatgtagttattttcttaatctgagagtctagaattcatctgtctccaagacctttaattagttggggatcaaaacaccacatttttgttttttcacaggaccattgtaaaataatacctctgaataaggcagtgtgaaatctatttttcctttccagtgtaaaacctcatcttataggaaattgctatgagagcaattatgctaaaaaggatgttttagatgaaataaattgaccacattgctttactgtctcccacattttgacttgcaaataactatattccctgaataaagccagtaagaatgactcaataggggtaatttagttgctgtataatcatcagatgcttcagtttccttactattgacttaaggtagcaaatattttagtttaaatatctccaaaatttgaaatttttttttgtttttttcttcatctaatatatttttaggcatgtaataatattcaaatacataataggtacctatatatgaattaaagcatattatttgaacaaaaaactacctggggcaaaaacaaatttcattgattcctcttttcacccaccaatcacctctttcttctttctattactgatttattaaactcagttaactgctataataaatttgtaaatgatgagtacaaattaattcatctaactggcgtagtatggatgaaaattattaggcgactaaagcctacagaaacaatttgaaaatgaaaaaaaagggtagggggagagggagataaggatttatatttgtggaaaatcaaaagggctgtcaaatgtccttatcccagaaattgaaatagtgaaattccttttaatcattcggtcaattagtttttggcatttttctcttccaatttaatatatcagaagaggcggttggcaatgtctggtgcatcatgatcccaactattcaaagccgaccatttagtgccctctgttgctgtgctattgatgttattttaatttaaactctaattattaaagttttagatatatttataattgtagctactataatattatgccatttaaaatttattttaaagtgggcatcctgtgtgctcagtctttcccaccctgtgtcccaagaatatttgggactgtcatacactcacacacttagacttgcagacacacacaatgactagatggaacttctatattttggatagaaaaacatcattttttctatccattgaggctggccacaatggcccacacttgtaatccaagcactttgagagaccaagacaggtggatcacctgaggtcaggagttcaagaccagcctgggcaacacagtgaaaccccatctctactaaaaatacaaaaattagccaggcatggtggcaggtgaatgtaatccccgctactctggaggctgtcaggagaatcacttgaacctgggaggcaaagtttgcagtgggccgattgtgccactgcacaccagcctgggtgacaaagcaaaactccatctcaaaaaaaaaaaaaaagaaaaatgtcattgaatatgtataaatatcaatcaattgatgaaaatttgcagaaagacattcctgcatgtttcacattctatttgacagtccaggagattctttcagatgatgaaataaaaaatcaatctcaattattagactgctcatttgacacaaatcataaatatcattcattatactactcccagttgttgatttttctttactacttgtcttagtctaatcaggctgttataacaaaatgtcatagactgggtggcttttaaacaacaaacatttatttctcacagttctggagacgcggcactgcagaattggtgtctggtaagggcctgctctggtgcatagacggatgtgagatgtgtttttgctgtgttctcacatgtcagatgggatcaggggagctctctggggcctttttataaaggcagtgatctcttcataaaggcagagtcctcctgatcctcaaatcaccttccaagggctctgccttcaaatactatcaccatgaagatcaggtttcaacatgtgaattttggggggatataatattcagttcctagcaccagttaactgttaactttactgttaaccttacttaattcatcttttgaaaataatgttctttcctttctttttttcttttttaagagacagggtcttactctgttgctcaggctggagcgcagtggtacgatcctagctcactgcagactcaaactcctgggctcaagtcatccctccacctcagcctctgaagtagctaggattacaggtttgcgccactatgcccagctaatttttgaattttttgtagagatggggtcttaccatgtttcctaggctggtctcaaactcccgacctcaaacagtcctcccaggttggccttccgaagtgctaggattacaggcatgagccactgcaaccagccaaaagtaattttctttaattaacttcttctttgaaacgtttcttttattaacaaaattcttccatgagtagaaaaagtaatttcttctttttgataaaccaacatctttgataaataagtttaactctctttttctcaaagaggaaaaataaactttctttactttcatatttagtactgaaataatattgaattattgtcagataaccacactgacaaagtagtaacctaagtaattaatatgaattctgaggataaaattatattagaaataaatgtgtattgatggcttcagcttaactatatgtcttagaaatacaacatcgtcatcatgatataagtgtcatcaccatgataattagtttattttctgatgtatttccgaatgcttctaaaaatgatgtaagcatattttctaatatatagataattacaaaagcacttgaactgattatttggaagcttttgttgaacttaaatttgaaaggataccagaaactagtcatatgtagtaataagaggttgttctgttcctgaatgtgtcggactttatagctcatcactattctttacaaaaaattcaccatattgtcagttgtccagcaccacctttccaccaccatctccactttctcttttattccagatgctgctcctatgtaggtcggcgaggaaatggacctcaggcaatctctatcggcaagaactgtgataaatttgggattgttgttcatgaattgggtcatgtgataggcttttggcatgaacacacaagaccagatcgagataaccacgtaactatcataagagaaaacatccagccaggtgagaggcatagaatgtgttgggtttaaggctgactgggtatctttgaattgtatttatgcagtttattatttcactttcccaaaaatgtaaactgatatttttgatatgatagagtaacattttgcttgattaaaaatcacccatgatgattttatattttattttatttttcctggagactgtgtgatttcatgcattttttagacttgctttcttttttaagatttagctgttttatttctaaactttggtgctttccaagaatgagtgtgagctattgagccataaattaatattattaaatatttcttttttactgaagcattttttgtacttagttctataatttatgttataaggattttaaaaaggcctggggtttgccataacacgtgctgctaccataggaatctgtgttataccaggtacaatttctggagaaaatccagtgaaatgagtcatttccaagctaatataaatagttttttctgagattttcctcttaaacttgactaccctaaagacaaattcttaggaaaattttcagtaattgaaatataatttctacttaaaacctatttttctctgatagttgatatttgataatggcctcaatgtaagactttttaacttttacgtgcataaagatcagtatatttcagttgccgaaaaatattctgttgtttggaattttcttgtaaggtattttaagcataagcaaagtaaaaatgtgtttttattttcttattcatgatcagttttgttacaaacattgaattccttctgtaattaacaatactgatctctttatttgctcattatatatttgatgccgattatttattgagccaatgttaggcgttgaagatactgtcatggaaaatacaaagtttagtgtgggatatgtgcatatatataaatgattgcaagtgagtgagaaaagtgacagtaattagtaatatatgttgaaaataccatagagtccaagcaaggcatgacgaaaagtcccttagtgagtcaagggagttgtaaaggaatggaaatttagaagtaaagcagaagtatttcaggcggacagaagagtgattaaatttcaagcgaaaaggacttcatgagcaaagctacaattacagaaaattgaattatttttatgtgaccattatggttgatggtaagttacaagtgggagattagttggtatcttatcctttacttaggaaagattctctatgatgtaaacctggggaggaaattcaggttttattctctagctagtggggaataattaaaggattataagcaggaaaagttcagattaaaataaagagaactcattttcccagtcagacttatagcgatcgttaactgggtggtggcgggggggtgcctgaagtccaggaaacctaatagaaatctaaataagtaggtatgagaggtgactaagttcttagggtagtacacatcaagaggaagaagaggaaatagtctttcaaaaatattttaagaggaatatcatcatgtgaggggaaatcttcaaaagttttctttttagacaacaagatgaatgttggtaccatcacatgaaacatttgagatattgaaatattgataaaacagcatgtttttgagaaagagaaggacaaataatgattcaatttagcatatccttgaatttaaaaagcctttgtatgatccttattttgtagagaaaggaaaggtgagtctggacttcaggatgtatctaaagataaaaaattgacatagatttcactaattagggaaaaactggatggagaatagaaaaaggttgagactataaaatgggtaaaaacaatatttaagcaatacttggtagagtatgtcctaaaagactaagaaggtattgcctgaaaggtaagagaaaaatcagtggattgtggtgtcctagaagccaaggaaataaataatttgaagaatggtgaagtgatctgtagggttagatatcaaaataagttaaaaaaaagtattctcctctatatagaagactctaatgaatgagccgactatcaagattcgtcctatataccactaggagggaaataaagaggaaataaatctgaaaattatttcaactaccacataaatgagaactttgctgttaccaagaattattcgtgttttttatttgccaaacatttaattacgtggaaaaaatttataaaagatgtaactttcaaaaatggtttttactcttaaaaataggatcctgtttcaatataaatatgtacctgaaacaaggagaagtgtatataatgtgtagtataaataaatgcgcaatcctaaaacagtgctaaggaaattatggtttgtaatattttcttttgactaaacattatggccaacagaaaaaaatctattgggtgagatttcctgaatgatgggaaccactgtaacagagcaattctggtataaaagtgctcatgttgaagattaatcttcaaaaaatttatgatttgctgtcactcagaaacttaagatcaagtcttagtcaagggtgatgtctaataagcacaaactttggcctcacatttatatgcaaaatcagtgattatgataggaaccaaattggtataaggattgggttactctaattcatgttagaatatgatttcaagaaggaggcttgccatttttaaaattgtcaaatgtggtttcccttagtgctatgtattctgcttctctttcctttcatgtaataagtctacttttctgttatttgggctgtgtatggctatgttgtttttaactaacaaaaattgttgtgtcatatgcacgttaagttctcaagttagatgcattaaaatgtattgctgaagttgcgtaatgttctactttcagaaatttttatggaatattttgctttagttagagaatctggtcccatattaagttctaaattgaaatcttacaggttaataagtataaaattagatccatagctttttgaaaatctgatcatagatttgttatattagacttcagattccttatgagacaggtgttttaacagttgcctctatcatgggttgaagagtatgttgaatatttcccaagaatggttgtaacataaatagacctatcagagatttgtggagcacgtatttcattataaggtctggttagttaattttaaattatgtattgtgtaaattcattcaaagacagactaaaacaccttgttctgggacttgggttctgtaacttcaggttgattcttcattcttaattctcaagtgaataccccacatttcctttatcacgtattggagagacataactcaatttctttattgcctttagaaaactctgtattaatgggatctttttatatttgattgaaatatgacagttggaattaaaaacctaagtagatgaatggcataatagttccatttttagctccaaaagtgaatttggaattcctttagctcatctttctttgtattttgatgtttcaaagctttttgttacataagtgatatgatttgtacaatctttgggtacttaaattgtgaaaactgagtcaccaaagcttaaactctgttttaagaaatgtgtctttccggaatcattgaatttaagtctgtgttcttttcaaatttcgagaaataatactacaatacagatacaaacaggcaattgaaaaatctgttaaaaatgaagatgtccagaagttaaactaacagatgtggaaatttggaaaagcatttacgttctgaagcatgttcttcttaatctcaaaggagaactgccttttcatcaagaataaacttgtttcatttttaaatgaaagtagagaatttgctgttactgtttgatcttcagtgatgaaatcgtggagcaaaagcctgcagagctctgtttaactaatattgcttttatatcttctcctattgtttcatagaaaggatctaaaccaaataggaagatgatttttgtatgacctggaaaacctagtcataaaaatgggaaactcatagataaaaacataactttgtgtaattatttgtacattaccaaaagtgcagtaagattttaaagaaataaatattatgaggtggtaaaagagcatacatataaaagaaagtatgctttttcatagtccaccttttttcagaaattaacactttgttccaattcaatattgcttttcaatatgatggtagagtgaagacagatgctttctgcatgtgcctgtgtgttttgtatgtaaattcgatcagcaagatcagtcatttcacaaagaacagatgcaggtgtaggaaaggccttctggtctattttctgtcagttaaaaggcttctgagattttgtttatccctggttcttaggtcaagagtacaattttctgaagatggagcctggagaagtaaactcacttggagaaagatatgatttcgacagtatcatgcactatgccaggaacaccttctcaaggttggagtctcaggttataccttttgacttttaattcctttcctccatgtggctcctcacaaagctatgcctgacattagaactagaattactttcaaatattgctacctcactgcagaaagtagaaaaataattcatgaacatttatagacaagagcaagtatttaaaaggcattttaaaaatatatttttaaattctctaccaaatatatgaatttaatatataaaatttataccaataagatggcataaattatgtaaacaattttatattcctaaatcattaaaaagttgaattaaaagcattaccaaaccaatcagcatgttaaattggcaaagaattgtttaatgaaaattggatatttataagctaaataggttatttagcagttctgttaaaatgtcacaatctaggcgacttgtgctttatactgtgtattttctactgctcaagtacaacttacactcaaaaattgatattactaaatgaattgtcaaataacaaattagaaagatattttacctcatataatttagaattatagttcatcactcattaaccctaaaattatgtcattaatgacttaaagctacttttaaagaatgcaataaatttgggttttgatctacttcattctaaagatgatgtcatcaagcaaatagttcccaggtaaggaatttggaactgttaaaccattgaattcacccctttttccatttatgcccattttatgctcgtatgtcatttcaactcttttttttttttgcccacttatgtccatttcacagttcattgacatctatttctgaaggcaaggtcaggaaaagggaaaaatattcaaatgtattaagctgcttttataaaactttcttggtaaaaagtagagaagggtgtgtaaatgaaaccttaatacttggacacatttattaattacccattttttccaaaccaaagtttattatttaaaaaatttgtgttaactgtatttttaaaattatgcttttctaaagtacattatttatagacatacgcattcatttgttaaaatataattaactgtccaaatgtttattttttctagaatatgaatttaagttttgatagaaataacatgctcagtaatttgacctgaaattaatcataaagagttacagaattttattttctggtaaatgcttggaatggagttttccataaaacatttaacaaatggatatttaggttccagttcagtcaaagtgcctctcttctgctactgagttatattgtttagaactaacctgagttttggttccttggaacagagaaggtactggagagtagagaaaaacaatttattctttttgtccttcacagatgataaatctttagcaaagttctaactgtatgtttccccttattctatacttttttccatgttgcattgtgtattttcccataaattaatctgctcttgttgcccgtagtccacctcacccacacctgcttatgagttgaatgccaatcagcctttgtttattacttatcttattgtttcaaaaccatcctatgcatttttcataaataaactcaacacttttacaatacaggagatcatatccacctgttagaaggatagcctgattgtttcattcacgttattttattttttaagtctttaaagaagctgtttattaacttatatttaaatgattttcaggaaaagaaaaatttgacataggtctcattctgctactccctcaaagtttttgaaatttctttttttttcaattatggaaaaacacaaaacatcaaatttactgtcctaaccattttaggcatacaagtcagtagtgttatttaagtatattgacattactgtaaaacagatgtccataacttattcatcttgcaaaacgtaaactctatacctattaaacaacttctcttttctacctcttctcagcctcttgcaatcaccattctatttcctgtttatatatttgactacttttgatattgtatataactggagacatatagtatttgtccttttgtgattggcttatttcactcagcattatttcctcaaggttgatctatgttgtagcatgtgaaagtattttctcacttttaaggccaaataatattccattgtaagtatatatcacattttgtttatcttgtcatccatcagtgagcatttgtgtagcttctgcctcttgtgaataatgctaatatgaacatgggtgtgcaaatatctctccagcacattattttttgttatttgaatagtagccattctgagtgtgatgtcatatctcgttgtggttttgacttaacatttctctgatgattagtgaacatccttttatatgctcggtggcatttgtatatcatctttggagaaatctttatttaagtcctatgcccatgtctaaatcaggttatttgattattttgttgttgagtagtagaagttctttgtatattctgattaaaccacttaatttatatatgtatatatataaatataaatattggaaattttttttccatttcttaggttgccttttcattcagttggctgtgtcctttgatgtacacaatgctgtatgtttgatgtcatcctgtttgtctattttggttttattgactgtgctttctgtgacatatccaagaaatcctggtcacatgcaacaccatgaagctttccccttgtgttttattctagaagttgtatagtttgggtcttatgtttatttatttaatgcattgagttaattttttaaagtgttttttttaaaaaagagaccaattttattattctatatgtagatatccagttttctcagtgtcatttgttgaaaaaactgtcatttcctaattgaggaatcttgacacccttgtcaaagataatatgatctcgtatatgatggtttatttctgtgctctctcttttatttcacccgtctatagatctgtctttataccaatactgcactgttttgattactgtagctttgtaatatgttttgaaatcagttctgcaaagttggagtgtgaatttttcaaatattttttctttttcaaaactgttttagctatttggtgtatcttgagatcatataggatttttaggataaatttttctatttcagcaaaaaaaatgttgggattctgatagaaattgcattgaatctgtagatcactttggatgtattaacatcttaacagtgttaagtgtttcaattcaggaacaagggatctttgtctcttctttaatttctttcagcagtgtctttagttttcagtgtaaaatctttcacttctttggttaagtttttttctaaggttttttttatgctgttgtgaatggaatcagttatcttttggattgtttgttgtaaatgcataaaaatgcagctatttttgcattttgattttatatcccatgactttgcttaattcgttgactggttctaacggattttgtgtgtgtgtggaacagttagaattttctgtgtataagatcaagtcatttccaaacagtgagaattttacttctttctgtccaatttggatggcttttattttgctttattttttctcgttgtcctggctggggctttcagtactgtgttgaatataagtgacaagggtgggcatccttgccttgttccttatcttaaaagaaaatatttcaggttttcaccattgattatgacattaggtgtgggatttttatatatagtttttattatgttgaggtagcttcctcctattcctagatttttgtgtgtttattatgaaagggtgttgaatctgtcaaatacttcttctatatcagctaacatgatcatatggtttttgttctttattctgttaatgtaggtatttgaagtttcttagttttaaaaattctgaactcacagagtctataaaagttccaattgtttttatgatgttgcccatcaatatatttaggaaatcacttatgggaagaacaggaatgtatctatagggtctttatatgagtgactattttgtaatatacatgcttctgaactgtggactgcccatttttcatttaaaaagtcgtaaaattttacaaatttttgttaaaagtatagctgatttgctctttcaatgtagttagaacaaatcaagaatagtaagtgaaccatgatatgatctgtctctgcctattgatagtggctcactgaggaggttcagtaagattttgcattgcttacttgtcaggatatggagaagaataattgttaacttcctgaccacaaaaaagaagaaaagcatgagtgactaactcccttgaaatggaagggagattaccttagtagacagaatgaaacaaaattcataattctgttgtctgaaattgaatatattctctccaagatgtcattgaccttttcaaattgaacctttttttggaagttaggaaaaaatcgaaccccagaggccacaaatttgtttttagaaatagaaaaagaaaatggtaaatgctttgttagtactgaagtactacagaaatttaatactccattaatttgggtttatgtaattaatgtatctgttgactcatgcctcaagttacaaggcctttctcaatgctaccttgtaactcatttctttttcaattacactggcctgcctggagtggtttcttatgaactatgcacagatctcacttttgatggtcaattcccgtaaatcactagctctacttctctcctgtcttttcagacaatgtacatatggagttctgtagatgtttagatcttgtagtaaagagttccagtctccctatttgagttagtgttatctatagatcagtgccctttcccttaccttggagctagggcagttagtaataaaattgctcatagatcatattactcctctgcttaccattttcctatagattaacagttgtcctcagagtaaaagttaaattatctggctggtgctcagacattttaggggtcctctcatttctgagctgttgtgtttcttgttctttctgtctggaaacactgtactgcccgttacccatatttctctgatcttcactttcttcatgtgtgactaaaatgtcaattttcaagtgagtttcactttgatcactctatttaaaagcagcccatcactgcacaatcaatatccatcttctcacctttatttttctcgatagtacctattactacctggattattaatcatttgtttaatgtctctttcctcatatttgaatattagaatcataaaggaaggaatttctgtttgttttatttactgctacaaatccagacctagaactatttcctaatggaggctaagtagagctgaaaatgctgttcttttaatgcaagcgttagtttaaatgcattaaattcatttataagttttggaaggaagtgctgcatcattttctcaatttaaaagatattataaaattttatttcttaatttaaaatatttttatagaaaggttttttgttgttgtttgtttttggtaaatccacaaacacacaactcatacttctcaaacccttggaatagcctcccagttcatttaacttttaagctcccacttctttagggctataaatatttgacatacatttaaaaaattagaaagtatttttagggcactatattcagaactttagatcatgcatattaggaaaaattagtgaatcttttaccacaatcttgagtcccaaacaactcactatctgtagtttaacattattatgccattgattaggttttcttatttactagttttaccatagaaaaattgaaaaaattgctttaaactgccctaagttttggcattctttgtttttttttatcttttttttaacatatgctgtaatacttggacttctaagaatacttaggttaaattagtagtttaattcagaaaaattaacctatgtatattttgttttactcttaacaattttagtaacttcaacattatttactgtagtttgctattggggaaatagacctctatgaggaatcattgtttcacaacctgataatctaaggaattcttagatctgcttgggaaaccaaaacaaatgtcatggtgtactttgtgggggattataaggtattccatatttttaagaacatacatgtttcaaggaaacaaatgaatgtcatcattgagtttatactaggcatacacatttaacatgcttttttttctactttgatgaaagtgttttgaaagcctgatacactgcttaaagcacacaaggtgtagttcccctttgattgacttgagtttgaaataaataccttataaatgtaaggaattcatgagttttcatttggtgacttaggtgtggtttgcttctgctttttttcagggggatgtttctggataccattctcccctcccgtgatgataatggcatacgtcctgcaattggtcagcgaacccgtctaagcaaaggagatatcgcacaggcaagaaagctgtatagatgtccaggtattgcactacacaaacacaagagcatgactgtacttgattgtgctcttccagatgaataagccatgatttactcaactgtttgtttgtctccctccctgttggcaagtgacgtgtacagttcaaagtcagtaatcataaaatgaggcaggagggaactctggaacacctaattgctgtaaataaaaacaagttgttgaaatcaaagttcaaacacagggatagtatattttatttcttttaatttaatgagtgaaagagcaaaatagaatggttgcttgatagtcattaattaaatagttgcatgatttcatagtcaaatgctaagtttcctttctgacataaaaagaatatcctttatttgaacttcagaattggatcctggatgatatttttttgcaagtaccatggttaatggcatataaattacaattttatcagtaggaatttataactttgttgtaaaaaaaaatgttctaaccggttgcaagtgaactactctatgttttgcccctaaataaagtttcaaaagcagattcatgaaacgtcttaatgttctaagggagcactatgccttaatcatccaagaaagaaaaagattctgttttccacattagaaatctagattctatgtacctccagtatactcacaatatttgaaatatcctacagcaaagaaacatgtttaactttgcataacacagtcttttccaaattatttgtccaaggaaacctccttttacccaatacttacttgtagaattcacttttggaagtattgttctagatacttaaggttgcagatacaataaaacaataactataaaagttttaattggctgcaaatctgataatgtttgcagaaaatcagagaaatgatggatatcttaatcattggagttttacatagataattggttatgtttatttatatattgttattgggaaattcttatattaattaaatttttatgatttctggtgtcagtccagggaacttttaggccatagaagagggctagctaattcattcataaaaaattaatatgtactcgttgacatatggtatagaacccttctgttggacagataaaactcaagtgcaagcaagaaaaagtgagttgtttgaataatcccaggaaatacctggaaacttcccaggaagttcataattctgtatgtgatggtacgtaattcattgattcaacccagtggattctgttgacattcctgctgagagaagggatttcctattccttaatactagatttgctaaggaaaattgtaagaaattatgtttttttttttcaattttactgtaattgttagttttcttgtaacttaggactattaagttttaaaagggccagttgatatttttggaatttaaagctgtatgtaaaactttttgcatcataatgattcaataatgaaagtgagttttcaaaaattttttgtgtataaatatatgtctgcctaatttttccatgtaccaaaagacatttctacttaatattcattaatttattacttcatgctgtttactgaagttgcattcatatttacgtaaatccctttaaaatgttttatgtatgtatgtaagatacacatgtatatgtggtatattttttaaaatcaaatttccataggaaaaaatgaatttataagagaatgatactgctatgaaaaaagatatgggtgatccttaactaatgtctagtaacattgggcatatacttttcaacttttaaaaagtgaaaattatttgattaacagcaactaaataagtgaacactttgtgtataaaactctcttgattatatctctaaatgtacgtctacatacattacatttgagaagcacactggaggtttgtatgcacactgaactgtaggaaagtcaggaagaataaaaaactaaccttatgatattgtaatttattttttagcctacaattcttggatatttcagttataaacaggaagataattagaagtatagtttctactttagatttcaattgtgtaaaatacattaatgggccattttcttacctgaaatatagaaataataatgtgtacattattttatttaatacaataaaaccacattgaagaaagcactatgatctgggaaaaagatattttgtatttctgaaacagtatgaaaagcaaattactgtattacagctaataaagtaccgggagtaagggacagctaaaagagatatataaatatacatacagatatatagagagatatataaatatacatatatatagatatctatttctctctgtatatatatcttttagtgttaaattttagttccccaaatctttgggaatgactttttcttctatcttggcctttttttaaacttttatctttgactcagtggctatatgtgcaggcttgttacgtgggaatgttgtgtgatgctgaggtttgggctgcgaatgaatgatcctgtcacccaggttctaagcatagaacccaacaggtagttttcaacccttgccgcctcccactccctcccctctagtagtccatactgtctattgttcctgtctttatgtccaagtatactctatgttcagctcccacttataagtgagaatatgtggtatttggtcttctgttcctaagttaattcacttcggattatggcctccagctccattcacatggctacaaagaacatgatttcattccttttatagctgcgtagtatttcatggtatgtatgtatcacactttctttattcaatccaccagtgatggacatccaggttgattccatggccttgctattgtgtacagtgctgcggtgaacataccagtgcatgtgtcttttcggtggtacgatttattttccttcggatatatgcttagtaatgagatggcagggttgaattgttgttgtgttttaagttctttgagaaatctccaaactgctttcctcaatggctggactactttttattcctaacaacagtgtgtaagcattctctttctctacagccttgcaggtgtctattgtttttcatttttttaataatagctattttgattggtatgagctggaattttaaatgttcaacaaatagccccctcccttcctcttgttctttctctttttttatgtttctttctctgcccctctcagccactctgtgcatgtggatatatctgtctccctttttacttctttctctttctgaaatagttagctttgagccctacatatagttgtatgtttaaggttcttcttttccttaaatgaagtgcactcatgacttatcaggataaggacaatgatattggcataaaatacttaccacaagccaaatgacattaagctacactgatgcagtaggtttaccaataactgcaagtatataaatggagtagagttaaagattcataactgtacatgtgagtcttaatagggtgactcatctgtgaacaacccagaagagagtaagagtttataaattgagttcggattgtgtttggttttcatacagagaggagggggttataaagctgagtattcctttggagtttgtttttttcttactcttttgtcagaaattcctggtggaaaggcagacaaaaacaagcaatggggaaaggacttcctattcaacaaatggtactcggatacttggctaaccatgtgcagaagaatgaaactggactctatctttcaccgtatataaccatatacataaattaactcaagatgaattaaagatttaaatgtgagacctcaaactataagaagccttaaataaaacatagggatcaccattctggacattggccttgggaaataatttatgactaagtcctcaaaaacgattcaacaaaaataaaaattgacaagtgggacttaattaaactaaagggcttctacactgcaaaagaaactatcaacaaagcaaacagacaacctacacaatgagagagaatatccacaaactacacatctgacaaaggtctaaaatccagaatctataaagaacttaaaccaatcaacaaacaaaacaaataaccccatttaaaaaatgggcaaaggatatgaacagatacttctcaaaagaagagatacaatcagccaacaaacatatgaaaaaatgctcatcattgctaaacatcagagaaatgcaaatccaaactacaatgagatgtcatctcacaccagtcagaatagctgttattaaaaagatgaaaaatgacagatgctgcagaggctgtagagtaaagggaacacttacacactgttgatgggaatttaaattacttcagccatattggaaagcaatttgaagatttctcaaagaacttaaaacagaactactactcaacccagcaatcccattactgtgtatatatccaaaccaaaataaattgttctgccagaagggcacatgcattctcatgttcatcactgcactatttccaatagcaaaggcatggaatcaatctaggtgtccatcaatggtgggttggatttttaaaatgtggtacctatagacctggaatactaggcagtcataaaaaataatgaaatcatgtccttttcagccgcatggatggagctggaggccataatcctaaatcaactaacacaggcatagaaaaccaaatactgcatgttctcacttataagtgggagctaaatattgagcacacatgaacgtaaacatggaaacaatagacactgtggactactagaggggagagggtgggaggcgacaaggattgaaaaattaccagttaggttctatgctcactacctgggtgcaatatgcctatgtaactatcttatacatgtactctttgtatctaaaaataaaagttgaaattaaaaaataaaagaaatgctggcaaatgaagccaataaaatatatttggctacttttaatgccagcttttttttctcatcagtttttgctcacagctttattagggcattttatggcactgttttgtagaggttaatcttgaaaaaaatactgacctgataaagaatatagttagatatacaagactatgggttttatggtctgtgataagtggggccttgggtccaagagggcaagtttctaacaggcagactgtaaatactgctgaactttactaaatgatatataaattttttaatgtatcagaagagtgatggcattaaaatgtatacattttaattttccttaaaatcatactatcagtttatgaaatttatagctgataaataccttgtaatacattcttatatttattcatatatgccaaaaatataaattaggttggtatatgaaaccacaattagttattacacagtcagtgcatactcatcatgaaaaagctcaatacagaaataaggttaggaaggggatagtatgaggatatgtttccttcagtttgcagttgttttcattgccatttcttgctcttggctttagagacaggagagtagtctttttatgcattgttgtgttaagaaagaatatgatcccttagagctctggcagtctactgctataagacaccctcattcattgccacatcacgtagccacaagcaggtgggaaaggaatgtagagctgctcgacattggggttgaataggtttctggacactgcttccaaaaggcaaatcctttgtctttatgatggtttccaagcctttcacgcataaggcattttaaaggacaactagtagctaatgctacttgcctgtcttacaatcttttctattccatgtactgtgacaacagtattccatatactgtgacaacagatgtccacatagggaggagaatggttattattacaacacttcatcttcccattaacccaataattagcagtttatttgtgaaggagatcatttctaaggtatacgagttgtaacgtattttctctcgtcttaaatgattgatttgttctcagattttctctcttttggggtcccctttttctatgattctcattttctaaatgcgttgacctccactttaccctactcataggattactttcccttcttattactaagatgcttaatttaactattcttttgttttaatctgcattttatcttaatttagtttttctataatcccatgaccttttgcttataactgtttagtatttagaccaactattgtccctaatattctctcagtaagtcttccttaattatgtcaagtaacatagtgaaatttttaaaagtataacataaattgataatctaaaaataaagggattttgaggattagaatctctattgttatgtaaaagtgttgcctgttcccacaggaacatatgtacaacctatgttcccaaatatgcaagtgtttctacttttaataaacaaagaatacttatatagagtgtacatatctatggatgcacatttatgtggaggctgtaggaatggcaggccagtttcaacacacatggagtctgaatgcattgttttaaacagttgcttcacttaatttagcgttaaaatgaattaaagcttcttttcaattacttaattcatagttacttatattttgagagaattcgcctatattctgaatggaatatattttatataactgcttttgtatatgtgattcttggctaaactatattgccaagatgcaaaaaaaaaatgcatttagctatttcttttaatttattcatggatatgtttattcatctacccagcagatattccctcatttagtgaatggttgccagggccatccagcagcccaagccagaactgtggggaacattgttgcctccttcctccctctgcttccctcctgatactcaatgagttcctgggttattactattatttttgcctttttttttttttttttttgagacagagtctcactctgtcaccaggctggagtgcagtggtgtgatcttggctcactgcaacctccgcctcctgggttcaagcaattctcctgcctcagcctcccaagtagctgggactacaggtgtgtgccaccatgcccggctaaattttgtatttttagtagacatgaggtttcaccatgttggccagaatggtcttgatctcttgacctcatgatccacccgcctcggcctcgcaaactgctgggattacaggcgtaagccaccgcgcctggcctatttttgccctcttagtatctcacattcctgtagtgaatcccttgtctaggtgtcatcctctcttttctggacagcttgcaggactcctgttggcctcttgcctttatttttatatcctatctgttctccagctatgctgcttgttgtccgggctgcatactgaatgagaaaagcttcctggagttgatattggtgcttcgttttaaaggatggtttgggcttggctatgcagttataacggaaatgtattttaaaatgttctagtaatttatctcttttaatatttccttatttaaacataattttaaaccaaaattgtatttatgatattttaaaatggaaaggaactatggatttatgaatagtttaaatttaccaactactaagttgattcaacatctttttatttctttctttgccctaaagattccttttccttttttttttttcgagatggagtactgctctgtcacccaggctggagtgcagtgatgcaatatgggcttactgcaatctctgcctcccgggttcaagcgattcctgcctcagcctcccaagaagctgggattaaaagtgcctgccgccaccacatctggctagtttttgtatttttagtagagacggggtttcacctgttggccaggctggtctggaactcctgacctcaggtgtttttattttattcagcccgccttggcctcccaaagtgctgagattacaggcatgagcccactgtgcccggccaagtttatctgttgctttggagacttacctaatacaaattattgtgtgtctacttatgttatcattactcttagtaaaattataaatgtgttcctacagaatatggagaatgggaagttttcaacctttgagatatgatgggagctatagacattagacagcaaaaatatttgcagatggatgtggagtcagctataaaagtaactatgtaattaaaagaatgagagtttattataataattcctcaacaatgcacaatctaagtggtgtttacacaattcaaacacaattttgtatgctagaaggaacatacatatggattatctaatttaaaataagatggatcacatgatataaggttttgtaaatttaacttctcagttgttttgttttaaatttcttgtgattagaacattggtatgcttctttatattaataattctttatgcttttactttccctaatattattgcagaagtagttgtattgctcacacattattactctcacaagaaacaccattgtgaagtttatattatcatgatagccattttacagaaaactgggataaagcttttgagctttgcatgcgatgatgtaattaataagtgacaatgacagcatttaaacatgtcatcttggccaggagcagtggctcacgcctgtaaccccagcactttgggaggccgaggcaggtggatcacctgaggtcaggagttcaagaccagcctgtccaacatggtgaaacccccatctctactaaaaatacaaaaattagctgggagtgttggtgcatgcctgtaatcccagctattcgtgagactgaggcaagagaatcacttgaacctgggaggtggaggttgcagtgagttgagattgagccactgcactccagcctgggtgacagattgagactctttccccaaagaaaaataaaaagtttatgtcatctcatccactcaccttgctgtcaatgaacagtctaagtaagcatttggacttagtagtgcccacttttttgttttgctaattttcctttagttttttaaataataaagtttgacttttatatctgagaataaatcaacaaactctgaaacatcttatgtagtaggggtcagctagcctgggacaatcacatttattgaagaaaattcacaagtaattaccacaacttgaatatacatgtttccacttcctgcattataatcagacactatattatctggacttattaatttttagtgtatgttgtattttgtttagcatgtatttatcttcttaatcagaacagtgttgtatgcatacatttatggattaagtatatttaatttatttaattgtacttgaggaaattcagtactggcattctctgtggcttagtggggttttaaattattacagaatttatttttaaactgctgttaattataggtttggttttttttttatagaaacacactcaactcccaaatcattgtttagcatttaactgatcctacttagaagcacattgtttgcattaataaaatctgagtacattttcatttttctaagacttcttttaaccttacatttgtcaagtgccctggatgatttatagaacagtgccgatttatgtattcttgaccttgagctttgttgtcccaaagttgcttttgtctgcctgttcatcagactaaacattgtttactcctacttcaaatatattgtgttgtacaaacataatacctatttttctgaataaacatttatatcatatctatttttagagctctatgctttgttttcatattcactatctttctttctttaacacaagctagaagatccatttataatttattgaggagttgatgagatgagagttcacctgctggtagctaaggccttgtaatatgataatagctctgttttgattgcagtgtccttcagagggaaggaactgttctttcaaattgttgagtgaaggttagaaagaggactggctgcagtggaggaattattcttaagttaaagatacttcaaacagcctaggttcatggcacattgcatctcttgcaagagcaacagggaagcccgttgtagaatggtgctgagaactagccctgggtgaacacagatcctgatgctatgcagctaataatttgctatttcaaatgactgaaaattggttccagggaattagacaagcttagcaagaggaaaatacacaaattgcttttttagcaatttctgcttaacctcaaccgagaaaagtaaataaatatttacatctttttggaaaatttgaatcttccatgatgtttatatacatatatattttttcttattttgaaaaaaaagtttattgtttcacattttgatattacctttgttgactactcattagctattatgtaacattttttaaacttgatatgatattcacttaagcttagcctcaatttaaatcaaaaatattagtgaaatgtttcacgtggtcccagagccatatcgtccaggtatcactggcctgaatctgaacatgggtgtgctttagaggggctactggctccttggaaatgaatgaaaaaggtttccatgaggaagaattttatgaatgccacattatttctcttataatcttattcggtgattcaccataatgatgccattaaatatactggaattccagtaagggacataaaaataaatttacttagaaaggaaacgtcttctataaaagacaaacatttagtcttgtctactaccaaaaaaacccttcatggctttgtttatgatattcacgtattttatataaattaaccaatgatcttatatatttttttcctttcagcatgtggagaaactctacaagaatccaatggcaacctttcctctccaggatttcccaatggctacccttcttacacacactgcatctggagagtttctgtgaccccaggggagaaggtagtttataccgtcaagcccactattttattcttatataagtacaaaagttcatcatccttcaaatataaatttgctttatcctttattcttgtttgagttttcaaatggactaaaaagttcagaaaattcataatgggaattgcttaaactccaggaatttttttgaaagatataattttaaactttttgatgcaataggagggttgaaataatacaaattatattctcagacacaaatgaaattgtggtaaaaatcagtatcagaaagacgcttagaaaaatccccatatattttaagatttaaaaatatatatctagatgtccagttcaaccaggaaaaaattataatgaaaattgtaaactattttcaactataatatcagaaaaatattgaagaccaaccctgtaaaatgcaaatagagtagtacttagttgaaagaaaattcacagacttaaatactacagtaggaaatatgaaattcagacctcaaactaatgagcctagacgaccatatgaagaggttagaaaaagagcaataaaataaaagatattttaaaagtaaatagtaaaagataaaattaataacatgaaaataacatatgattggaagtatgaacaaagttgatagtttgaattgattaaaaacaacaacaacaacaacaaggaaatgggtcaggcgaggtggctcacgcctgtaatcccagcactttgggaggccaaggtgggcggatcactcgaggtcaggagtttgagaccagactggccaacattgatgaaaccctgtctctactaaaaatacaaaaattagcctggcactgtggcacacagctgtaatcccagctattccgggggctgaggcaggagaatcacttgaacccggacagggagagtgcagtgagctgaaatcccataccaccactgcactccagcctgggtgacagagcaaggctctgtcaaaaacaaaaacaaggccaggtgcggtggctcacgcctgtaatcccaacactttgggaggctgaggagggtggatcacctgagattaggagtttgagaccagcctggccaacatggtgaagccccatctctacaaaaaatacaaaaattagctgggcatgttggcatgtgcctgtaatcccagcttctcgagaggatgaggcaggataattgcttgaacctagtaggcggaggttgcggcgagccgagatggcgccgttgcactgcagcctggacgataagagcgaaactctgtctcaaaaaaaaaaatagacaaaaacaaaccccaaggaaatagatgaaaacatgtctgatcaagaaagatgaagaataatagagaaagcacaattatctaacatttgggaaaaaaatttaaaagattgttagaaccatagagtctttagacaacaaaatgagagtaaaagaatcttttgaacattatatcaataacttaaaaacaatgagtaaaatgggcaaatttctataaaatgttacaactcagttcttattcaagaagaaattaaaaagtattcacaatagcaaaaacatggaatcaagctagatgcccgtcgatggtggatgggataaagaaaatgtggtacacatacaccatggaatattatgcagccgtaaaaaagaatgaactcatgtccttgtagcaacatagatggagctaaaaggccataatcctaagtgaatcaatgcagggacagaaatttaaataccacaagttctcatttataagtgggagctaaacattgagcacccatagacacaaacatgggagtaatagacactgaagactactagatgggggagcctgaaaagggggaatgggttgaaaaacgacctatgggtagtttgtactttgtctttgattcttatttacctggaagaacttaagtactctcattagccgtggtgggaatgcaattgcaatttttttaaaagtttgatgttcttgatgataactgaatggtattaggagataatcatgggtatggagttgtccaggattttgtaatattcgcagtggaaactctaaatgaaatactcatgtaacataaataatttttaggtgcaaaaagttacaactgacttggaatacatgaatgcatgcatagttcttgatataatttaaaaattataagtgttgtaatatgatcataggtgttgatcgatttttatttaagttcttttaacaagagccagaaaatatattctgaaggtcattcttactacaacactgaaaagtgaactttaaaagatacaaattttgagaacaagtttaaagtatacatgattttaaaaagaaaacctcatagaatatgaaaagtttgggaacaaggttaatcaaattaaattgtttcataacagcaagttaatatctgggaaaaacatttctcctgtccaattccaaaactctcgccattagcattgagctaatttatttttcttgtatgtatgattatctataaaactatatttccaaaaatgttgtaaataggaagaaaaaatctatcatctattatttttcttaatattatttatgacgattagcaaataaattggagtgttataagaagccagtgaacaattttaactcattataatcctcgtgtctttattattttcttattttctttctcctaatatttggtttcattctgctgggttttttttcttacttcttgagctgggaatttaactcattaatttcaagcatcttttcttttccaaagcagacactgaaggctgtaattttcccctcagaaatactttacctgaattccaccagctcaaaatagaggatttgttatgtttcaattctacttttttctattgttattatttcttcttaacccacatattttttcagtaatgtgtttttcttctttgcaaacattgtttcttcaatcatccttttcctatttatctctccttgagtcacctttaggtaaagcactatctttgtgtgtcagtctttgcaatagcttcaggctgatatgaccttggaagtgactagtattcataagactaatctttgctttaaaaatatgttttgtgcaatggttgggtgcatcatcttaattgtgatgctcatagattctctatattattgttttatctgtttatcagatatttacaaatatttgtcactatggtagatttgttaattgctcttcatagccttgttaatttttgttttatatatgtttatgctatatcattttatacacatgtttacaacattttatccccctgatgtattaaactattatcactgtataatgaatttctttatttctagagatggtttgggttaaaactctatttcgtctattattaataaagctacacttatattttgattaatatatttgccaggtatatctttgtcctgttctagacatctagacattcaataatttccaaccttttgtttcaggtatccaattcagtttatttttatttaatcagtggatggcaggttttgtctttaattatagtgcttattttaattctatttattgtgactattggtgtgttttagacagtatacagtccagtttatttttcgtttaacccatgatggcaggttttgtctttaattagagtgctcattgcagttctatttattgtgactattggtgtgtttttatttcttatttgcattttaatacatccctttttttgttctccccctttgccttcttatgcattgaattatgtttttttatcatttcgtatttttctctctactggtttgaaagttttaaatgtatactctatcatttggtactctctaccagctttctttcttaatcaaattatatttaatttgtatctttagcctcttcccattcaaaaaaggatcttatcccaattcaaaaaaggatcttaaaacatataagattattcgctttttataagatattgctttgcatatttgttgatacctttttttaatcaagcaaatgagacactattgtcttttgcacttaacattagttttacatgtgcaaatgctaccatggatttttgttatttattgtggtaaaataaactataatattattgtggtaaaaactacatagcataaaatttaccatcttaaccatttttaggtgtacagttcagtatgttaagtatattcactttgttgtgaaacagatctccagaactttttcatctcgcaaaactgcaaccctatactcattaaacccaacaaatcccttttccttccatccctttgtgcctggcaatcatcattctactttctgtttccatgaatttgagaaacttcatatgattggaagcatagagtatttgtccctttgtgactggactatctcacttagcataatgccctcaagattcatccatgtgacatgatttattttttatgcctgaataatattccattgtatgaatacacattttctttatcctttcattcattggtagacatttaggttgcttctacctcttggctattgtgaatagtgctgatatgaacctgggattgcaaatatctctcagagaccttgttttcaagtattttgattatctatccagaagtgaggttgctggatcatatggtagttctatgtttaattttttaaataacctttatactgttttccatagtatttgcattatttcacagtcctcactaagactgcaaaagggttccaatttctgtccatcctcaccaacacttgttattttctgttgttttgatagtagccatcctactgggtgtcaggtgatatctcattgtgattttgatttgaatttttctgatgactagtgaacatcttctagtgataacttgggcatctttttgtatgcttaatagccatttgtatatcgtccttgtagaaatatttattcaagtcttttgcctatgtttaaatcagattatttgattttgtctttcaactgtagaagtttttatatattctggttattaagcactgattagagatatgatttgcatatattttctcctccttcacaggttgtattttcactctgttgattgtgtcttctgatgaacacaaattataaagtttgatgtcataccacttgtctacttttagttttattgcctgtgcttttggtgtcatagccaagaaatcatggccatatgtaatgacatgaagtttttaccctgtgttttcttctatgagttctatagttttacagtcttatatgtaggtttttaatcaatattgtgttaatagaaaccattcttgtacatgtggatatccagtttcttcaacaccatttgttaaagatttactaaatgtttttattcagcattcctgctcatgtttctgacttctattatggcttattttggtcctgcctatagcttacattatagattattttttaaattagcgtttttgtttttttctgtttgaaaatgtggattttttacatgaatttataaaactatagtttcactggatatagttggctgcacatttaactttgttttaaataaaagcttgcaaaaataccttcatttcaaacatttttaatgtacgattttgcacattaaagttatcaaaagtgatttaacaagcactaaaaatttaataagttaatacccatgtaaaatgaatgaacaaagaattactcataaaatgaagctgcttaagatgatttctgaaggcagttttcccaaattcttggatacctctcatgtaacaaaatgtatcttaaacgtattataaatcaatgtgaagtccatttatttattttttaaacaagtaaaattctgaaaggcacacctcatacaatccaaaaaaatagaactatgtacggcttattatatgaatataaacacatgactgttatataaataagttaaatcaagatgtatcatttataaattttataaattatggcgattgcaaggtctttttttttttttttttttttttgacatggagccttgctgtgttgcccagactggagtgtaatggcatgatctcggctcactgcaactttcacttctcagttcaagcaattcttgtgcctcagcctcttgagtagctggaattacaggcatgcaccacctcacgtggctaatttttgtatttttagtagggacagggtttcaccatgttgcccaggctggtcttgaacttttgagctcaagtgatctacctgcctcagcctcccaaagttctgggcttacaggcatgagccactatgcccggctttaagtttttttgattccaataatatgagtttatttcaatgttataaaatatgttaatttgaaaagtaataggtcaaaatttagcaaaaacctgtctcaaaatttccacaaatactgaatgaattagaattcaacgtataatgataaacaattgaataaataggagtagaaggaattttttaaaaatacaataaatagaaaaaacctagtatttcttgagtgcctacactacactaggtgctgtgccaagcttctctaatcttctcagcaccctactgacattagtactagaattatcttcatattacaaagaaattgaagttgagaaaggattgagtaacttatctaacgtcacacatgtggcatctgacatttgccagagctaattattaaatttttctttagttatagagaatgtgttttttcttttctctaaaatcaaaataatcaaccaaaatttaagcaagactagagatattcaaataaaaacaaatatattaaaatataacatattttagaaaactagaaactttactgtgggactaaaataagcagaataacatgtcatgaaccgaaatgtaaaagtgtagtattacaaattatcagttcttgtcaaattaacgtatagtaattccaaattaaattccaatagatttttgttttgtaccagaccaaatttttctagagtttatcttaaaaataaaatagttggcaaattcacaaacaatggtaatatgggggagtgggttgcactataagatagaaaaacattatgaagcctcagtaattcaaattctgtggcaatgtcaaaaagtcttctgtatcaatggacaaactaaaaagaccagaattatgcctgagggcatagaagacttctgtcatatacttgtaaggatcatttttcaaataaattgggaaaatggattttctcagtaaataatacttaaatcattttaaaggatatgtgaaaaaattaaacaagttctacttcatattgcatagttttctaaagaaaacaatgctttatttgctttctgaaaaagattatgttgaatacatgagttgaaaataagaaaatttaaaataacttgttcagattatccacgtaaagttgtttttataaaaatacaaaaagcacaaataaaaatgaaaacggagactattataacacataaggatgagggaccattgggtcattcatatgtaaagagctgttataaactgataactaaagattcaccccacagcagaaaatgcctgagaaagtagaaaatttagtgaagtatcaatgcaagtagatattcaatgaatatatgaaattctttaatcttattctttatcagagaaatgctatttgaactaacaataatttgtcatatttcacctgtaatattggtaaagatagaattgaatgttaatatcaagtgatcataaagatacgcaactcctgaaagtagaaattaaaataaccttttagaagcacattgggtaatttgtattacactttacaaaatgtacctgcgcttttgcccagatatttatcctagaacaattatctgagtgtgtgcaaaggcaactgtttattataatagtgaaagttggaaacaaaataaattttgaaaacttaaagaaaactctgatttgagaaaatgtttacaatatattatgaaatatttaaggcaaatcaaaagttagtggtatgagaagttctgtaatttaaattatgtacattagagacaaatttatggaagaatatataagaaaatgatgcttatttctacctgctgagtttgcaaatagtttttatgtcttctttgttcctttaaaaaattaccagcaataagcatatgttattttgggcaagagaaaaatattgtctttaaaaaatacagtcattgtaggacaatgatgtgaatgtacttaatgcacagaactgtatacataagtatggttaaaatggtaacttttacattgtgcacacatattataccacaatttaaaaataagggtttcagttcacatgcatatctttcttagattgagactctcaaagtacagagggatttctgttcaatctaaggttatccttgatgttgcatggttcatgctggcaacaatccaaaatgtgcagcgaagagggtagctgtgttgagctgatagaagcgcatggtattgattcttgcatcccttagaattgactaacctttgaacaagggcagattgcttatgtcttgaatggacttaatattttctattttcctatataacccatttagaagctattgactattttttgcagatatttctttttaatcactcatctatgatttacacatatggagtgaattcgcagtagtgtatttatattgccaaagacattgcttaaatttagcaattactattaaattattctattaaaatagatgtatcttttgatgtgtgaaataaattattgctattataaacttataacctagtaatataatggttaaactttgaaaaataactgaaaaaagaaaatacaatttatcatggactttaggaaagctcagatcttgttggaagatccatgcatgactgaagagatggtagcattcaataaagattttgagcgatatgaagaatttcaaggaacaaggaaggggaaagtagagtccacatagaattatgttcactttaagtaaaggaatgggaatagagctgagattggaatactttgtcagagcacaatagcaagcagttagggatgagtgggatgaagtttatgtgcttgagataatgaaagatgaggcagcaaaattgggttatgactagagtcattgattccaaaaccttgatgggaagcaaactctattgagattactatggccataaagtgtaggatgaaatggagaagagtaaaattaaaagccaaagcacatcttgtgaaactattacattatattcagaaaagaagtatagccagcattgacatgaaaaaggaaaaagaagtggaggagtatttttagggatattatagaatatcacctataggatttgacaattaactagatgtaggggtgtagtgggaatttaggaaagagaagtctgagtccattaatgcctctataacaaagctcctcagactgagtaatttgtggacaatagaaatttatttctcactctcagaggtagaagctgggaagcccaaggtcaaggtgcctgtagattcaggtatctggttagttctcattctctgcttcttcttgcattctcacttggctgaagggttggaagggacaaagggataaaatgatgaacctgtttcctcaagcccttttatcagggcactaatctcatttctaagggcagagccctcccggcttaatcagcttccagtggtcacttcttaatactatcactttgaaatttaatttccaacatatgaattttggagggacatacacactcaaaccatagcgagaggtgtaaaaaatgttctgatgactagtgagtgatgattcatcaaaatttcaaagtcagatgttatcacataggtttaagcagaaaagttattttaatagaataattcagctcttggtttccacctgtcatcaaactgatgtttgtatgtttcagagcatagatggaataaggaaatggagtaataccttattttatatattttttcagggtttatattgtgaggaatgtctgaatatataccatgaaaataataatacataagaatcttaatagtgctttgggattacctgagtatttttctccacatcattcaattaaactcttgcgagttaattctggtgagataagcctgatatggtgacctcccgtttacagcagttaagattcattcaacctcagaatgtttaagtaaaccagcgaactgagaagttagaacttgaacccaggtcttctgactcccaatcaagaatagcttccagatgtagaaaaagttgtattttttttttcctataacatgatataatttcagagctgaacaaaagcttaatgatcagttattccagagactggcaaacatttctggaaagaacatagagtaaatatattggtttttgcaggctgtacagtatttgtcacaaatactgatttctaacattgtagcattgaaacagacataaacaacatgtggtaaaggaatggtcccgatagaacttttacagaaacaggcttcaggcagaatttgatccatgggttatagtttactgatacctgatttactctctctcagccttatttctgaggcaaaaaaaatatcgccactctggaaagtttactagacttgtgcaggcttcttctggctatagcatagcaatctagtttatcttgctgctttttcagtctaattggcaaggtttgtacattctgtatcttcagccttataaggtatggtgcaagtattacgctaattggctttttttgtggtgctcatggaatttgtttaggtagccaataatatcttaattgtgctgaaaaaagttcattgattatatctttctctggagactcacagacacccagtcccttgaactgctgatctgcctttcttcaggattcttcactctccagcattggaaaacagtctttaataagcacaattggcagcagtgacatctattcaacgttgcaacttagactcctaacagatcacaggaaatcttaaaattgttccctcaatctcatactccaagggagctataattaattttgagttgttacttatacttacgtcaaaaataaaatatttatatagttgtgttttgtatttttcatttgatcattctttggggaaagatgcaatatgttcacgtaaaataacataatgtaaaacaagcagatattttccaagtgtgtttgatttgttattcaagtacgaatcctgctagcaaccttagtcaaaggccagaattttatgtctataatcagagccctatgatttgattttagaaaacctatctttattacattttctgcttttaaaggactctgtgttttatgttaatgtcaggccagttatgttcctccatggtgcttggtgtttaaactagaagattaaaaacaagttagaaaaattttctgcttagagttatccctatccaactgtgtgtgtgtgtgtgtgtgtgtgtgtgtgtgtgtgtgtgtttcaagagagcaaatattaactatttctttgcaatccaaatgcactttttaattttggatgaaattgataatacacatacttctaatttagctttattttttttcctcatgaagaaggcagtagaagctatttgcatatcattataaaactaccctttcaatctaagagggaagccagaacgtgagccctgggggagtctctgtttgtgtctatattcaagttttgctgtctctgttttaataaatgagttcttatgtaatcatatagagttgaaaccttggtggttgctatagggaaaacataaatgcaaaatgaaacatagtatcaggcagtgatagtattctccatgtggagcagacttaaagtaaacacaaagttaaagggaaaaaccaggtattatttcctagttatatcctgaatatagtctaatgttgcgttggtatttagagatgtaggagaaaatattgtgggaaattcataaaaataaattagatactaaagcattttgataatcaagtgttgaggattattggtaaaaatgatcaatgctttgcctttggatattttgaaaatttttgtaaacacttaaaaagtggaaccttacaatgaggtgaagaaaaagaaaaacagaaaaaagataaactgcaaagagggaagataaaaataaatgaacaattctattaaaaccaatttatggccaggcacggtggctcatgcctgcaatcccagagtttgggaggctgaggctggtggatcacctgaggtcaggagttcaaaaccagcctggccaacatggtgaaactctgtctctactaaaaatacaaaaattagctggacgtggtggcgggcacctgtaatcccagctactcaggaggctgagggatgagaatcgcttcaacccggaaggcagaggttgcagtgagctgatactgctccactgcactccagcctgggtgacaagagtgaaactctgtctccaattaaaaaaaaaaaaacttattccacaacttaatgtactacatttttaaaaaattccacccctattttcttatccttggcagatttctttctttgttactaggaaagtacatgttagtctatatggatatttgaaaccaactttggtgtacagtttcatcactgatcactgtggtacctagatatgagatgccctgagaaatatttatagttatcctgtgtcatttgggaaagaagtaagttcattcagcattgatttgtaataattagtgcttaccttgatgttaaatattgtgttcaagaaaggggagaagcatatactttccagcacagaattggtaatacttctctagaatatggattcagtattgattatgtttttattttccttctttctttccttcctctctccttctctgcctttctttcttctttttttcttccttcctttgttattccttgagacttctttcacattcagccttttgtattttcacaaaagggatttttgaatattgctacaaactatagttttgtagtaggagcatttggaatactcaacatttgttgcttttggccaaagtccatcacaatttctagagtagagaactggcttactatgagccttaagcatctcagatgttttaagcagaatagagttagaatgagtttttgaatgtgaaaaaaaaaaaaccagatgaattcctttgcatcagataagcatacttctcgcgtaagtttggctttacttttggtgtaatcaagtaagaagaaaaaagttgtttggaaagtaaagtccatttataaagcagtaagaaagttgtctttcctagaattgtctcttgagttatctttacgcaacagcatcattttgaaacaaagcacagaataagggtcatgtacaagatgctgtaacttgaaaggtctttgtatatacatctttggatctagagaaacatagtgacatctgcctttgattatcattagatggacaaattctaattctaggactgtatttaaaacatttcaacatgcacaatgatattatatgttctgggaaagtggcacatggtggttatttttaacataattatagatgtctgactggtcatttttgaaataaattattttttaaaagactttcatgaaaaaaatagaattcttcatggctcaagccatgtttatcttgggaaaattcaaaataaactatttgaataaaaatttctgtttgctttacaattgtccagattaactttacagaaactttttgttaattgctaacatatctagtttgttcaactactcatattgtacttctcctgacattgtaaaacagttaaagaaaatgggaaaacatggtttcaaggtttggttcagaaaaaaactattaggataattatagtatagaaaaacaattagctgcacatgcatttttactgtagaccagggttccttacctttaggaatcaaatcactatatgtagatacaatcatttttactctgtgggttgcttacctccattttgcagattgttttaaattttacaacgatggatctatacaagagtagtttgtgctggtatgactatattgaagtaagagacgggtactggagaaaatcacctctccttggtaagatatcctttcccttttatgtggctatgtatctattctgtcccgtccaaaaaaaccaaccgattctctcaagagtcatcgtagagttaaaaatgtgtgtgactaacattatttttatgttagttatacttttttcaaccataccaaaaatactcaaagacaaatggataaatacattgactgattaattaatttgagctagcttaacttatgaggtacatactaggatttgaatataatgattgagaatagctttctcatatattgtgcctatcatgagtactcctcacagtgtttctgtatttttgctttaaaaatcagtttttgattaaaaaaaactaattgtgggtgttcatgttgtgtgtttgtgtgttttgtttttgttttgttgctaagccagtataatgtaaactgttaggtacatgtttggtagctggcttcctatgccaagcatattaactcttattatattatagatgtcacaattttgcttctcagagagttttctgtggctgagaagagacatttgtagtttgtgtcataaactgtagctcagatctggtgctcatgaaagtctgctgtcaacgtttaaccacagaccacactattaacttgcataggcagtttactgttgccctctgttttacttaaaggtgagagctgtttggagcatgcaggcatctactctatattgatctttttctgagattgtaactttttctttacttttagaagtagttttgctcagttgcattgatgaactgtacagctcttttaacatctaacacctactgaatgggcacaattgtattaaaagtgacagcagccatagtaaatccaagagatctgtagaaatatttaaaaataaagaattgaactaatgtggtaagtcaggttgaggaaaacattgtcttccatatttagtttcttagcctagatgaagcaattttttacatatgtatgcacaagccaaagaaaatatttcattaaactcatattagagaaacaaatctagagctaaaattctgaacgacacttctttttagagcaccatcagcattacatggctcaatgtataatggaccaccagagtgaggcagtgtaatcatggtttttgtgtgaaaagctttccttactatttcttctaagaccttgctccaaaaagtgcagcacttagattggtagcatcaaaatcatctggaaagctgttagaattgtagaaacttggctctcactctatatcctctgaattagggtttgcattttaatagatttcctagaaattcagatgcacactacagtttaaaacacactgctctgtgttatctgcctctaatttgctttgcaatttaggacaatatgtcttcacctgttagctgttagtatgaacttgctttatgcaagtcagctacatttttcatacactaaaactatgtatgccatttccagagacacaaaaatggataacatgtttgtagaattattgcatgtgctttgttatatttaagcattttgtgatcatgtgaaagctttgagcatagaggcagacataagcataaatatttgtggaaagataaggaaggaaggaatgacaggtattatatttatttgctgtaattcatatttctggatacagaattagaagaaattagaaattatgctcaagtcttctgatagtatttgttattctgcctaaacagatataatctacagattatagctttatagatgagatggaatgtgtgcagtgataaaagataccaagagtagccttggggttttcctcaggagtgctgttgaacctaggtgaataaagaactccactttgagctgagagcacattctttctttctttctttctttttttttttttttgaaatggagtcttgctctgtcgccaggctggagtgcagtggtgccatctcggctcactgcaacctctgcctctcggactcaagcgattctcctgcctcagccttccgagtagctgggactataggcacgtgccactacgcccagctaatttttgtatttttagtagagacagggtttcaccatattgtccaagatggtctcgatttcttgaccttatgatccacccacctcggcctcccaaagtcctgggattacaggcgtgagccactgtgcctggccgagagcacattcttaaccaagtcatttccctgctattggccaggttgacaatttgaaaccactttcttagggtgacttgcaccttttttctgttccccattaaataatattccccaccttgatgcatcatttgacctttttcaaatattgtttttgagtaaccatcttacttctacatatggtaacaatactgacatcagtcagctactctgaggctgatggtcaaatactttataaatatatatgaagacattgttttgtttatctaccattagtaagtaaatttaaggcacagttgtggctgcaatcacttggaatagaaatgtgaaccaaatcggtgtttacatattatttgtgactagtacaaaaagaacgtagaatatagagtcctatttaggagtttctctttattcttttatttcttttaggtagattctgtggggacaaattgcctgaagttcttacttctacagacagcagaatgtggattgagtttcgtagcagcagtaattgggtaggaaaaggctttgcagctgtctatgaaggtaagtcacattgaattttagagagtagttcatcttatatctcaacagaaatgttcgtttcttaatttcattacaatgacattgtgaccatattgtaaaattatgaatttttctgaatctgtattataatattcatacagataattttaacagtaaatttaaattgcaagaacaacctgttgtctagtatcagtgatgtaataatatctaaatgtgttcaggatgtgtggagaaaaaagcaaatggctcaagaattcttaaagtttaattgtttcatgatagttttaaaacattatgaagaaattatcattttcctttgtactgattttgtgtctgtttggtccctgtattcccgaaatactttttattagaggaaattgcacagaaagtaattgtgccgatttctgaggcatgctttatctaaataagagagtcagcatttgaggaaggacttattaaatgctttgttttatgcttctctaaaacaataaactggcattgtgctttcttggctttaaaaccagctcctttcttgccaggttgtgggtggaggagacacttcctagtacagcagtttaagtaattttgaagacagaagatttctgcttcccttaaacttttaagtaaacggaagcattttgttttaaggattaactgcctagtagtgaagaggattatttggagggagtcacggacgctgcgcacatgacactaactcgctgccagagacccagtgagttctgttcaggatgaggctcctcttctgatgagctattttacctgtggtcgaaagaccaaaggaagcagctcagagaatcacagaacaaactcacagagaataaattcacaaagccactaaaggtttttaaaggttaaaaaataccttttcgttaagataggattaaaaattatttattccttgaccattatctaatatttgtagttactttactaggttttttttaccacataaatatttgctacattacaaccagtcaactttgatttttatagcctggtctttatgtactgagctacaggagctgaacttcaatgttaccctagaagaaaatgaaaatgaaatagcatgtccaggcttagttatttgtttattttttggctttcttcagcgatctgtggaggtgagatacgtaaaaatgaaggacagattcagtctcccaattatcctgatgactatcgcccgatgaaagaatgtgtgtggaaaataacagtgtctgagagctaccacgtcgggctgacctttcagtcctttgaggtaaagtcttttaggctatcttcctggcaaatattctccataaacgacaatggcatttaagagaatcctcattaaatcagcaaagaaacagagagtcagccttttaatcagcaaagaagcaaaggatcgctcataaaatgcaacatcaagagcaaaagggttttttttcttctttcctcgtttggagacgttttcaagaagattaaagtgagtttacattatctgtgctatttgaattagaatgtttgaagtactgacaatagtttcttttgacaaatgcacaggcttatttcacaagagtgtccattaagtaatagaacttttatttctcttctaaactaagagattaaaaggtagaaagtcttttttgtaagaggaacaaaacatttttcaccttttttttttttaccataacacagataattgtttatatcaaaaatagggattttaagtgttcttacgagctttcaacctcgttaaaaatattcatcagggagatcagcagcatcgttgtgttattagatgacgggtcagaagaaaccaaaggccaatcagaatttttggatcaaagtctgggtccagaactaacacgctggcccgtgagtcatttttgtgggttgaaagggactgagttaaacatttaaagccaagaaatagaggaatttctcaggaactccagagtatgtttaaatcagagttggtctagtaattgagagcccaagctgaagtggagaagaacaatgagatgcaggtggtaggtcccaaccagggttagaaatttagatacatgattggagatggagtctttactgattggaagactaattcactaagtgatcagaaggtagtcatgagccctactacccagtgggtagtaatgagcactatgaacactacttactgagggcagtgaccgtggtcatggttgtgtgtctgtacctgcagcaggagcaccaggagaatccagggattgccagtaaagccagagaatctctcatcctcatctggaagcctgtaaattctatttcttcagtacttgtctctgtccccttgcatgtaccatttaacttcccagatgtatttccttttgttaccaaaaaaatatatactttctactttaatcattatgttgtattttatgctccagaccattttttttttgtacttttggaaactggttttgccattatttgattgacagttgaactttgttaatttaatggactaataggtttgcaaatactgttcaaatagaccggtttattgttgatagttaattaaaattgagtagaaaaatttcacccatgatttagacaaaaaaaaggctcataaaaattatccacccaatgtctgtgtttgctgttttgtgatatttcaagaattaagagattaactgtcttttaatatgtaattcagtttttttgtggaattctattatagacatgatgtcagaaaatgcattcattccatcagcctgaaaactgatgcatgaagttgctaccttagttgatttgtagtttatttttttatttatcaatgcaatagcagtgacagtcttcaaaaataagataacataaggacaaatggaaaagatatgcacctcaggcacttagaaccatgcctgacacacagtagttgcttaataaatacttgtttactgaatgaatgaatcagtgatgactacagtttatgacctgggaaaagtcatgtcatagaatggctgagagtacattttatttattgtctctagtttcctgtcctatcttcatattactttatttctatatgtttctgcctccctcatttatatgttagacatattttgatatctggtagatctcttgtctttacatgaccaaaaccgaacccttgcttattttattttacttactaaacccactcttcttctatttatgtcagtactatttcagtactttttgtcaccgcttacccaaggaacatccttaattctaccttttctcttaagccctgcagccaatctatcagcatatatcagttgctttgtcttcaaactatacctcatacacgatgactttacaccaccactgttctcatcatcacccctttgcttggaactcacaggaagaacctcaggtctctactcttgctctgcatatcccgttcttcacctcaaaaccagagtgatgcttttacaatgtacgttagattatgacactgcgctactgacaggggatttccatcacacctaaaataacatctagactcgattatcatgggccacggtacttttgattggtctttggctcctcctcactccctctgtgtcagctcgtctcgccctctttctctttctcagaaacaccaacctcactcccacatcacagcatttaccactgatgttccgctgcctcagatctttgcttttactctcctattactttatttggatctctgcttaattactgccttcttaaaaagttcttggctgataacactacttaaaatactttcttacctacaattacctctaaatcatcactctgttttatttttagtaaattgcacttccaactaccagaatttatgctgcatatctctttatgtacatgtttattatctgtctctctcactagaatatgtccaccaacggattgggatcttacctgtgtctctgatcattttgttaggattttacctgtgtctctgatcattttatctccagcaacattgtttgtgagattaatgttgggtaatagatgagaaaaatggatggatggattatatgtaagtcaatgtatgaatgtgtgatggttggcagatgaaaatgaatatatcctttattaaaggcatgtaagtttccatgcagagggaaacaagcctggatacataagaaagatttagattatggagtacctggtatggtgaagttagactgactttagactagagacgctgagtttcaagaaattcacaagtcacaggatttaaaggtgcctaatagacatctaaatcttctaggcaaggaaactgagtttatgccgctaacctagtatcacactggtgagtactaaaagagcattaaaacccaggtacatttgatcctgattttgtttgcaaatctgcttatttactaaaattttggaagcctaaaattaatatttgcagtgccttctaggtcattcacagacatgtacacagcagcaaattttgagtcacctaatgtgcccattgccagctgtgatgtgccttactgagaaaacacgtgtgtcagattatcttcgttcagacatgtatggtgtatatatagggctgttgggtaagagttcagtattaataaatgggcaacctgtattaatgcgtctttaaacagaaacgcacaaaacaaaatgttgtgactagaatctcacaggaactgtaaccctaggagcaatgaatcagtacttgccagttcagtattccgagcaacttaatagaatgtaactagcatgaatatcaagaatcagctttatatattttcttatttgttctaatagtcattaggtggttgtttaatttagtcaattatctgtttatatcaatttttttgtttacatatgttttcaatatgggtattatacattttatacatatttatgttgaaaatgtataatcaaaatgttttcataaattttcaatattatatgattttacctgataaagtacagtttttattcactgattctagtctttgccttgtttcaaaaactgtttatatttttgtttattattcttttttttttgagatggagtcttgctctgtttcgcccagactgcaaggcagtggcgcgatctcggttcactgcaacctccacctcccaggttcaagcgattctcctgcctcagcctcccgagtagctgggactacaggcgtgtgccactgtgcctggctaattttttgtatttttagtagagacagggtttcaccatgttagccaggatggtctcgatctcctgaattcgtgatctgccctccttggcctcccaaagtgctgggattacaggtatgagccaccgcacctggcctcatttattattctttatagtaactaatataatatataattaataatatattatattatattattattcttcagatataaggaccatgaagataaacttgtccatcatgctgttgaaatctactttaaagaacttcttagctgtccatcattcatgcttctatgtgaatttatgtcatggctttacctttgccagtgccatttgcattttcatgaaagtgctcaaataaagtttatgtgtctttgtgaatgagtttcaggaatctttgagcaggaaggaacactatttggcaggtaatagaatcttgatgcctctgtaattataccatttgggaagtgatgtggtctggatgtttgtgtctacccaaaatttatatggtgaaacactgattctaaaggtgatggtattagcagtggggtctttgggacatgattagtcatgagagtggagccctcatgaatgaatcagtgctcctataaaagaggcctaggggctaggtgctgtggctcatgcctgtaatctcagcactttgggaggcctaggcaggcggatcacctgaggtcaggagttcaagaccagcctgaccaacatggtgaaaccccgtctctactagaaatacaaaattagctgggcgtggtggtgggcgcccgtaatcccagctactcaagaggctgaggcaggagaatcgcttgaacctgggaggcagagtttgcagtgagccaggatcgtgccactgcactctagcctgggcaacaagagcgaaattccgtctcggaaaaaaaaaaaaaaaaaaaggcctagggagcttctaccatgtgagggcaaaatgaaaaggcaacgcttatgaagagggccctcaccagacactgaatctgctagtgccttaaccttgaacttccagccttgaaaactatggaaataaatttcgtggtttgtaaaccaccctatctatgatattttctcatagcatctggaatggactaatacaggaagttttctctcctctggtagttattggatacattattttttaagaccagtatactgaagtgagtttgtatatgaatatagattccctctgaaagtaatttggaaagcttgttctctatttagcagcagagtcatttgtaaagaagcttctagtactattattttatttgagaattttcagtaagaagaaatacaaaagagaaaaagtttggaaggctggaaatgtttacagtaacaacttcaaaggaatgtcaccaaagcagaaaagaagtgaaataaacctggagcttacttgtgtttaaattgaaattaccacgtacattagttcaaacggtattaagtttgaggtacttgtcaacattactacacattctgatttggtgatactttccttatgaaaaccagagctgattaataccgttaaccaccacagctgcgagctgaaacattctaaactatgtgcataagtttttatcttggtacttggtagattgcttgtctaaaagtaatcctctaaatcctttaaatattttttattaatttaatgataagtagactagtctttgtgagtgaactaaaaagccgagataaggaggttttaattagttaaggattttctgcttgccatgtactgtttctgggaacttagctgagaatatattttagtaatgactataaaacagaggagttatgcagctcttcatgaattacggtctaggctatccttgtgtctgaaagattagcacttgttagtttcaatcaacttgcccaaggttgcacaactggtagcactatgatcgaaaccaagccctggctctgtgcatttatgtcaccaggtctagtagtaaagagaagcgtcagtattctattgatataatattacggcattcaaatctttccttttgtaactatcttcacttacacatttttgttgtttaatcattatgtgtcagtccatcagaggcatgtctgttttattcaccactgttcacatactgtcaagtgaatattatttggccatagcaggtttacaataaaattattaaatttatgagtaatcaaaaaatacttgaatcatgaagaaaaaaatgaagtggcagcagttaaatcattcacatgaaaataaacctaagcaagacctatgatgttgcttttaacatgtttgaacttttttttgagctgtaattattcatgtgttgtgtcaacttaattttaaatattactactaataaatattattaaataaataagataatataatttaaaataattatgttttaaacttttcacctttttattcaatgttccttttgtttatactattatttcctagactttactagatttttctcattataaaaattatttttaatttttaatgataaatgctcatttgcattgtttttattaatcagagttttatttaacattttcccccaaagcataaacagctttaacattgctccaagcgtatatcatttaaaataatactatctatacaagttgcatcatttagattgcattaattatatctgattacattagctatgttttaaagctacattgtaacagtcatgagagctatatttgattaaagcaaaatatacataacataaaattttccatcttaaccagttgttaagtgtacagttcagtagtgttaagtagattcaaaatgttcaagcaatttccagaactcttcatcttgcaaagccgaaacactatcccatcacacaaaaacaccctatttttttcctccttcccctaattccttatggcaacctccattctttctgtctctatgaattagagaattttaagtacccctttttaaggtggaataatattccattgtatgtgtataccacattttatttatccattcatctatcaatgaacctgtggattgcttccactttttggctattgtgaaaatgctgctatgaacgtaagtatgcaaatatctctacaagactgtgctttcaattctttggggtatttacccagaagtggtattgctagatcatatggtaattctattttttattttttagggagcatgggataccttttactaaaaattattatctagaaatttctaagttttcagagatttttataaataactagatactgcaatagatatttgtgcaatggtatattgatttggaaatttggttatcaaatgaaggcaagcatgtgagtgtgtcccaagcctggccatgacccctacctccagggctggctttccttcagtgccagagctcacccacatgcactgaccactaaactctgtacaggttggcaggtttagaatgagaggttgaccacttttggttaaatttattttagttgttgctaaatagaaatcacttactttttctatggttcgtcttcattctgcattaaagatatgaaccctcagtagtgaaatgtactatgaatcccttctgactagtctttgtacatgttcttccttctttgtgtatttggctctacttctgatatcatttacttactagttttctgaaaattgttcagagcttactatcactttccctatattctctatgaagatattaggtctgtttacattatgataaacttgtcatattaatacatggtttatgctctgcttaccttaaagtgtgtaagaaatcggcatcatctttatttattatatgtttattgtgtgtttaattatacaagacattgagttcagctcccagttatctgaactgtatccatgctttaactcaaaaagaaactgctctttctcttttcttttttctcttttttcttttttctcctccctccctccctcccttctttcttccctccctcctttccttccttccttccttccttccttctttccttcctctttctttcctttcttttctttgtttctttttcattctttctataaatcatcgcctttggtgttcttttactgatgaagcttaaacttactggcatgacatcgatggacttgattcacattttagtttcaatcatatttatttctatccattccatatattaattgatgaagtaatttgatgtagctcaagaaaatgttacacaaatgacacaaataaagtaactcaaatattcatttgtgctcattgttatcactcgtgttgatgtagctgatgaagtataattatgattagtacaaatggagtaaattcattgtgcaagccttgcatttaggattaaactggaaaaataagtaactgaagaccattcaggtaattgacgagatatctagaattgttgttgtaaagatataatgtatttccaaatatcataaattcatgtagatgaggcacatattattttctaggcaactcaaaatctgtggcattcactgtgtgagaatgctgttgccccaaataccaggtacatatttaatatgtaaataatatgtaatgcataaatatgtactagtgaatttaaccctataattagctatttttacctgtgaaatatttactctttgtgtatcatataaaatatttaaaattacaatttttactaagtaaccagtgaatacactgtaaattaaaatgtaaagtgaatgattgtatatctattaaaggaatagagtgagttttatagaccaggcaatatataaattatcctatttctttttaatcattgaagaaatctgaaattttgagtttcattttcaataggaactatgttgtcttccttgtttgtaccataatttttaataataatcttcttaaaatagtaattaaaaccctttttaattaacatttttaatttttacactagcctgatttctaatatgaagcaatgtaatattatcttttttaaatttattttattttgtgatggagtctcagtctgttgcccaggctggagtgcagtggcacgatcttggctcactgcaacctccacctcctgggttcaagcaattctctgcctcagactcccaagtagctgggattacaggtgcctgccaccatgcccagctaattgttttgtatttttagtagagacagggtttcaccaccttggccaggctggtcttgaactcctgaccatgtgatccacctgctaagacctcccaaagtcctgggattacaggtgtgagccaccgtgcctggtcataatattatttttattaatggaccttctactacaagatgttgcttccttcattgtgtattctcaattcttgtggttttctatctcattctttctccccctcttccaataggattggtgaatcaggagcagttcattctgtgctgctttagcaggggaggatagtttggtttgccaagactttggttattttgtctacagttttgtcatttattctgttatcaaactctataacttgaaatctgagatattattttctgtattgtccccttgaccaagaacagcctttggccatctggaaatgttctcatatttatagagaaccctgattttgaagggattaaattaaagactgagataagaggttatgtgtatatatatatatatatttggccaaattgggcttgtcacccctggtgaccaattgagttagtttttaaaatgtgcttttaaaattagatattctttatataaatattttccatttattcccataattgtacactcacaaaaataatttatttttaggaaaaatatggatttatgaaaagtatccaatgagcacctaccttaaaatcacagccttctctcccccacccaatttctcatacatctctcatccagttactaactagacctgttcttaattaatttctgagatcagattatatcaggaaacttcagggtggtaaggccatagccatcttctcacacttcttatcttgctacgctttctatttttccattgaatttatgactttctaatattttatgatttaattatttattttgtttattgttgcttttctggctactcatcagtagaatgcaagcaccaggagggcaaggttatttgatatttttctgaatgatgcataccaagcagagagagtgcctagtggagagtaggcactgagtattttgtgactaggaagcagcaaatgtagtacctagttctaactaaatctgtgcttcaaagtgtattttttttgtttgtctttatactacctcatttgaagactattattgttagtgttttgataaggcagaaaacatatttttctaccaactatactggcagtttcatgcgttcaagttgcagttccatggacattccccgatattccttgacattctacgtattccttaacactagtaacagagttccataaattaacgaattgtatgttgagtgatattgacaacatttgatacttttcttggtgttttaattgtagatatctctgctttctacttttaaatacctaataagcagttgactctttgaagactttagttctagtggtcaacttctgtgaaaggtgaaaaacaagaattttacataaaaattgtcttacaatttttaaaacaatttataaattttgtttttttttgttggtttgttttcagaagttcagggctgaaacatgggtccatgaacatatagttccccataaagtgtcataggccaatagtctcacctgatatttgcattcatttgttaaggaaagagattgagtttcccctgattatctgggctgagaggagtgtgttgagataaaaagcctcatccaaacaaggccatatttccttgggaaagggaaaaccactgttgattctactatatagtagtctttctctacacagccaggttaattatggagaaagaattcaatagactgaggaagaacagtaatcccatattatcagattttcgtttcaaaaagagatttataaccaaaaatagtgctacatttgttcagagtatttgaatccaaatcttctatgaatacaataatgattttattgaaagactatggagcaatttttttttattatactttaagttttagggtacatgtgcacattgcgcaggttagttacatatgtatacatgtgccatgctggtgcgctgcacccactaactcgtcatctagcattaggtatatctcccaatgctatccctcctccctccccccaccccaccacagtcctcacagtgtgatgttccccttcctgagtccatgtgatctcattgttcaattcccacctatgagtgagaatatgcagcaatttttataactatgattcagaagaagttatatattacttgcagcagtgtatcaggcccagatttttagtgataatttttaattttggatttttttcagcctctattgaatgaagaatttctacttgtagtttaattttcttttaaaagacaactaatttctgctgatcctgactcatgtggatgtactgtttcatagttattttttatccttccctgtctaccagaataacatcctttgttcatggatattacagtgtacgttcatgagaaacattcaagtacactcatttgatacaaataacttttatattaacaaatcagaagtatggcactgagaagacatctatcctcctatataaaatgttttatctataaacatatattttcacatatttttttctgttgcagattgaaagacatgacaattgtgcttatgactacctggaagttagagatggaaccagtgaaaatagccctttgatagggcgtttctgtggttatgacaaacctgaagacataagatctacctccaatactttgtggatgaagtttgtttctgacggaactgtgaacaaagcagggtttgctgctaacttttttaaaggtaatttgaaataattttcaaacgtgagattttctttatcaaggatacttgtagtgtttagctttgatttaggggagaactagagaaagttgtattgaaagttgaatatgaataaggatattttggagagtttcgatagaaaaggttattaataaaatactagagttttagaacttcatagcacaggataggaattc

SEQ ID NO: 104 - DNA, 186442 bp, Homo sapiens
gaattcacatctgagaaggataaaatgttatttaaaacaaaatacaggtagatttaatgtagaaggatcaaattcaattctggagacagaataatctgttgaccacaaagtctgatcctctctgatatgtctatagtttctttattctaatgccaatgtgaggattgtcttctgtcccaatgtcatgtgtatttgccccagcctagaggtaataatattgctttaatgtgaaaataaataaataaataaataagtaattacttctctggtgctgacaccatctaactatagtaaattataaatccacatccttctgtgaccatcctgcacccccagtgtttcctcaaattacttccagaacttttcagagaagcctcacatatggtcacaggcaagtcctttcagcctccactgtctactgagttctatagtgcctgcaaagctgggctttgttgcagttttatcctctgagtgctctaagttctgttcaaaggaatggcctcggtaagctatagctgaatccactgctggaggtggtgtctcctgctatgaataaccccagtgctgacactcctgtgctatggtgggcccattccttcttgctatatttacacatgacctgtgaaaatgcctctttgaacatccaacatctcacagagactttatgagttaacattttttaagtttaactttgtcacacagacatttctttctctttttgacagaactcataggattaaaaaaaaaattgagtgtattaatttgctagggttgtcatcgcaaagtatcacaaactgactacttcaaacaatagaaatttgtttgcagttctggagggtagaagtccgagaccaaggtgttagcaaagtcagttccttttaaagcctctgtcctcgacttgtagaagggctgtcttcatgtttacgtgaagtgctctctctgtgtgtctgtgtcttctcataaaaacaccagtcataccagattagggcccaccctaataacctcatttaaccttgaaagggttaacagcccaccaaagtgatatgaagattactttaactgaagaatatctaaacaatcagcagccacataaagaaacataatctaaacttagcagagactccccaaatacagctgccattgaccccctccaaagcagtttcctattagagggctaaaatggttaattctacatggcaatttaatggggccaagaggtgcccagattaaacattgtttcttggtgtgtctatgagggtgtttccaggtgacattagtatttgaatcagtggactcagtagacagacctccctaaggtgagaaagcatcatccaatttattgagggcctaaatagaataaaagtcagaggaaggaagattttggcccctttgcttcttgccacatacttgctctgggacatcagtcttctcctgcccttggaccaggatttacaccattggtttccctggtctcagagcttcagacttgcactgaaattacactgccaactttcctactatgtgagccaatatttcataataaatctcttcatatatgtatatattatacataaatattcatatgtatatataattggttatcagtaatatgtcaatatatattattggttctgtttgtctggagaaccctgatacaggagaatactagcccttggcagcaggaagtataaattacactgtcataacaccccccctcctcttcaggctgagatttcagcctggataaacactgccatttctatttgcatcaaaaagccaacaggactttccatacttccccactgaaaccctggacactggccacagccacttaccctccttttgtttaggtagtatatagacctatacctctggctattcaccgagtcattcattactgtgtgttcctatatatgtgtgaattaaacctgtcttttctccttagtatgtctgttaattcacaggttctgatcacttgaacttaagttgacagaaagatttttcttccaataatcttaattacctctttaaaggcctaatctctaaatatacgttcatgttctgaaggtactatgggttaggattttaatatagatatttggggacactatttaacccataacactgagctataaatttctccaaatcacaccttctctctgatattagaaaatcagtcttagaaagagcttatgtgtctcatttctttactcagaaggtctcaaacaattacgtcaagcatcccttgaagaaactaacctgcttgcctactgggtatgtctaggtgtgtctgatcctagtagtgagagtcagcagaattgaaattcaagctgggatgtatactgtgttctctaaactacctaatatgaaccaaatgtgtaaagtgtggagttgagaaaatattcccaaatggtcaacaatttagagcaacattccctattttgcttcaagtatccacacagagacacccaaaaatgagtctgggtgattatcctgggctctgaacattagatgatgaacaactgaagagaaatagaagatcccacaaatagaggttaagagaggactatgacatttctaacacagctgaatctagaataaaaattaatcagttcatgttctgcaagcagtagtagttctagaagccttgacccccattacctcacatagcaaccaacttacagataaagtgctgatgggattttcaatcacaaaagatttgagaagaattcactggagactgtttttcttaatgagtccattccttgcccagaccacttccctcactgggctgatacagtaaggtgtattccttggcatctgataattgtcattaagtcagccttttggggagccatttatgatagctcacaacaaatttgagtattatgtgcttttcatgtagatgcatttcttaaatggaaaagtctcaaatgagcattgataggtttatttcaagcacattaatttggttattgcccttatgaggcagtatttttcaactctcatatttattttaaaacctaaaagctgtatgtgttagtccattcttgcattgctataaggaaatacctcagactgggtaatttataaagaacataggtttaattggctcacaggttctgcaggctgtacagaaagcatggtggggaaggcctcaggaaacttacaattatgacagaaggcaaaaaagaagcaggcacatcttacatggtgagagtaggaggaagtgggtggcggggggtggtaccagacacttaaagaatcagatctcaggaggactttatcataagaacagcaccaaaagggtaagtccctccccatgatccaaaaaccttccacagcgtcctacctctaacactggggtttacaattcaactggatatatggtcagggacacaaatccaaaccatatcattctgcccctggcccctcccaaatcttgtattcttctcacgttgcaaattacaatcatgccttcccagcaatcccccaaaatcttaactcattccagcattaactcaaaagttcaaagtccaaagtttcatctgagacaacacaagtcccttccccctgtgagcctgtaaaatcaaaacaacttagttacttctaaaatacaatgagagtacaagcattgggtaaacccacgagttccaaatgggagaaattgcccaaaagaaagggatgacaggccccatacaacttccaaacccagcagggaagttatgaaatcttaaagcttcaaaataatttttattaactccatgtcccatattctgagcaggcttgcacaaggggtgggctctcaaaaccttgggcagctcttcccctgtgactttgcaaggttcagcctccacaggtgatctcatgggttggcgttaagtgcctatgactcattcaggtgcagggtaaaagctgccagtggatctcccattctgaggtctggaggatggtagtcctcttctcacaactccactaggcagtacccaagtggggactctgtgtaggggctccaatctcatgtttcccatcttcactgttctagtagaggttctctatgagggctccgtccctgcagcaggcttctgcctggatatccaggctttttcatatgtcctctgaaatctaggcagaggctcccaagactcaactcttgcactctaagcacctgcaggcttaataccacatggatactgccaaggcttacggtttgcatcctctgaagcagcatcccaaactatatctggggaccttttagccatggctggagctggagcagctggtatgcaggaagtagtgtccccaaggctcaaggcagcagggctggtcctggcccatgaagccattcttccctcctaggcctctgcatctgtgatgggctgggctgcctccagggtctctgaaatgccttggaggcctttttctcattgtcttggctatcagcacttggcaactccttacttatgcaaatttctgcagcctgcttgaattcctcctgagaaaatgggtttttcttttctaccacatggccaggccacaaattttccaagcttttatgttctgcttcccttttaaatataagttccagtttcaggtcatttctttcctcatgcatatgagcataggttgttagaagtaggcagggcacatcttgaatgctttgcggcttagaaatttcttccaccagataccctaaatcatcactctcaagttcaaagttccacagatctgtagagtaggggcacagtaaagccaggctctttattaatgcataaaagcatgacctttgcttcagttgccagtaagttcctcattccatctgagaccttatcagcctggagttcaatgtccattttggtcaaaaccattcaacaagtctctaggaagttctaaacttttcctcatctccctgtcttcctctgagccctccacactcttccaacctctgcccattacccagttccaaaggcgcttccacatttgcagttatctttatagcaatgccccactcttggtagtaatattgtgtatcagtctgttctcacattgctataaagaaatacctgagactgggtaatttataaagaaaagaggcttaattggctcccgattctgcaggttgtacaaaaagcatagctgtggaggcctcgggaaacttacaatcatggtgaaaggtgaaggggaagcaggcacatcttacatggccagagcaggaggaaggcaggagaggtgccacacacttttaaacaaccagatcttgtgagaactctatcatgagaacagcaccaaaaagggaagtctgcccccatgatccatacacctcccactacgccccatctccaacattggggatcacaattcaacatgagatttggtcaggaacacaaatttaaaccatatcactgtacccagccatcttctcagccttatgccacccctgttagttaatatgccataagaagtcagagaagatttttcatatttcctaataacatttaactatactatccatactgctaacagtgaaaatgtttttgatgataatgagaaagtacaaacaaattattcttgtctccatttaaagcaattctttatatgctcataaactaatttatttgaggctttggtttacatggttctgtgctagcaagcagagatggtttaaattatatttcttcaataagtcatctaacactttttaaagctttaatatagaatgtctagtgctatagtgtagatgactgttaatttgtgtctcttcataaataatgtgaaagtatttaactttggaaagagaagactataagaaactgatttaaggaacagtatgagtttctgtattacaaatatttagatattcttaagaatatttgtagattcccatatgtttatatgagaacaagacccaggtccatttcttttattattcttatctttttttttgccagaggtgcatgacaaataataaatgtttaagaatcagttgtgaatgatgaatgaagataatatcacatacttgaacatgggatcgaggagatggccaagttaatagttgacacaatgctcagcctaatggtaggccctgtgcataacacaaaagatgtccaaagtgtggtctctgttcatgcagacttctaaaggtctatgctttaatatccaaatattttaattcatttgctaatcattagacagttaatataggcaataaaaagattgtaacaacaagagtaagaaggaaaagaatcagccaggtatttactgaacacttcatacatgccagtcattgttctaagccattaatttgtcttattatttgcaatgatcctgaggtaagtagcattattgttcccatcttgtagatgtgtaaaataaagtagtttttctcctcaagatgtatggaataaaatataagttaagttcaaagtagaaggtattattttatcaaaatctacaaattatattagtttagtaataaatatatattaccaattacattaacaactttgcccgggtttttttttgttttgttttgtttttctttgagacagagtcttactctgtcacccaggctggagtgcagtggtgcaatctcagctgactgcaacctccacctcccaggttcaagcgattctcctgcctcagcatcccaagtatctgggattacaagcgcctgccacaacatctggctaattttcatgtttttaatataaacgtagtatttttaatttcaccatgttggccagactgatctcaaactcctgacctcagatgatccgcccgccttggcttcccaaagtgctgagattacaggcttaagccactgcacctggcccaaccttgccagttttcaaacaaatatttctaatatagaaaaacactttgtaactatctgagatttggatagtcatcttatttacagtgtacaaagttttacaaaattattaacattcacagaaaaaaataaaaccaaatacagaaaacctaaaactattaccatgtgcagaactaatggaatcaaaattaatttctatctatgagaacagaaaaaaaatgcagcatacaataatgtgtttatcctaagaatactatgaaattctttcaaaagtaatatcgtaatgaagagatgcctttttagtctcttactgataattaattttctgttaatatttagtgttacacaccctggagccacaacttaattcacatataaaatccaattgtgaaattctaaacattgagaaagaatctttaattttgttaaaactgaaagaaaatgggaaagatatttctagtaccactataatcttgataaagcaaccttaaaaatgttgaaaacacaaaaatattagattctattcccaataaaatcaatgctgctaattattttttcattcatgtatccatttaacaaatgattatttagtgcttactatgtgttagacatggagttaggcattttttagcgaaaattgatatgaattcaatttctaattatgtgaataattaagaaaaatcaaagtatagaatttttaaatgacttgagattatattatttcttaatttattcttcattattttttgtgtgcccacttaacagagatacattttaaaatataaagtcactttcttgctattaaaaagattgaaatcatggcaagaagaaattttatccggccttgcatacaacattgaagattagtctatgatgatttagatacaccacactgccctagtagatgtaatgaagtcattaattaaattgtgtaaagaatctagaagataaagctcagcatcactagtcataaaagaaataaaattgataacaatagttatcttcacctgccaaacactagagaattagaaatgttggaacaactaagaatatggagacacaggcatggtaataaaaagtgctggtgggcatacaatctacttaccagatttttttttgcagcaagtagtcatgtgacaaattctggccgataagatataaacagaagtattgtatatgacttccaggaaaattctgacatcttgtattattaatgttagtaaccatttaagatatcaaaagaggttttgcagaataaagagacaattaaaagaaaatggtttaaaagcacagaattttctgtaatacaaatagctggagaatcaaaaatatttatatttgtttatataagacaaaaatgaagtatgtgcattttctgtgctgttttctttgttaaaaaatataaatgttctccaatagcattatgtttctaatgactaatacaaaatgatggaacaccccaacactgatatttgatggatacaatctcaagtctactttttgggaatacaggacctatgccaagagttctcagcccctaactgcctaagaacactgggaacagggcaaggaaattctgagttccttaagattcaaattacagcaaagcttacctcaagtggtttaagcagtaagaacacacgctattttgtacaacaaaaactctggaggcagatggttccaacgtaggttaaattaatagcccaaaaaagtcaaaagttctagctcaaagtcttgtgatcctctgagcttttccctcatgctctgaagatggctgcagcttctctgatcatcagggcctcacatagtaatctccaaaggcagattaaaaatgaaacactattcacccagatgtttataacagcttcatttataattgccaaaacttgaaagtaaacaagatgtcctttggtaagtgaatgaaaaaataaactatggtatatccaagcaatgaattattattcattactaaaaataagtgagctatcaaaccatgaaaatacatgaaggaaacttaaattaacactcttaagttactgaagccaatctgaaaaggctacaaactatacgattccaactatatgacattcttgaaaagacaaaactgtggagttagtaaagagatctgtggttgccaagggttagggggcaaagagagatgaacaggaggagcacaaaagattttggagcagtaaaaatactctgtatggtactatagtggtggataaagtcattatagatttgtccaaacccaaagaacgtacaacaccaacagtgtaccctaacgtatcctatggactctgggtgataatgatgtgccagcgtaggctcatcagttacagcaaatgtatcattctggtgggggatgctgataacgggggaggatgtgtacgtgtgggggcagggctatatgaaaaatatctgtatctccaattttgctgtgagcctaaaacttttctaaaagaaaaagtttttagggaaaaaaaaagcattctttattttcaaagaaaagcaaccataaataatgatggaaacatgaaaaattatattttaggtaggtactatctctgagacagactaatatcttcatgaatgtttactaacagtgacattttatttttaaaacttcaatttttacttttaaataaaaattattaaattattaacataaaattataaattattaaattgaaaatatttttaaatttttaaaattaatttttggtttttaaaattaaattgtattaatcaaaaactacttgtacatattaaataaaattgaacatgtatatcattaatctcacaactcaataagactctcctttttgttaataacagtagtatggttatcacttagtaagttccagccaaatgccattttctttgtatataataaagttatatcattagtatatttatgtcacctccagtcaaattttagctaagactaaatgacattatgttccaggaactttcctaagtactttacatatatttacttaatcctgtcaatttcttgtgaagttggtattattagtatccctataaatattaatgattacagggtggtcttagtagcaccaagcctcatatcctcccagaaaaagtgcaaagcatggaagaaaggagaggcttcttgtgaaaagttcctggaagtcttctcttcagttcctatgagctagcagtggagctggtgcaaggagagctgagaaagccagggtgtgggaggcgggctctgccaataaggaagtgggagaagaggaacacccttagggaaagtacaaccagatcagtagctactgcttcataacaaaccactcccaaaacagttatttaaaaccgtgcattatttctaaaggtgccatgggtcacctgaccttggtcaggttctggtatcttggctgggatcactagtgcatttgtattccattgctggatcagttcttgtaaacctagtagagaactactggtagtcctggaacaatctcctttgaagcatttctctttattcttctttttccattttcatcccttggtgctagagccagatattgaggtcactatttcactatgaggttcagaatcctgactacctcatagtagcaattctgggtgaagtacatattaaagaggaagcacatctttagtttccagtaactggcatttggttatggggtggctgtttttctacgtggaccaagcagggtcccagttcaagtttctgctgcctatctgataatcttgaggtatttatgaaggactcctttgaaagttctctactgagtttccttaaggaattggaatatgtaagtaaattactgtccagaatggaggaaaactatactaatcacaatgaatagaccatatattccttatgaaattcatatcatttgaaggaaaattaggttagtaactctaccacataatgtgtttgcttatggaattttttactcacttcttcagtccattgtatttgccatgctttagaacatggtcatggatcttattggggttatcctcatctttattcctgagcagtctctacctttggtggcactgcttatattatattgatatagttttgattaagttttaccactgatacggctccagtgagtagaggaacaccaggactcttgtctcgtgtggattagctaaaacaacacggacacacgtggagtggctttaaggagtggagagtttaataggcaagaaagaaaagagaaggcagaaggaagaggctagccttacagagacagaaggaagggggctccaaagctgaaagaggaaaccccaagtgccacagataccagccagtaggctggagaaggcagtgtttgatttgcatagagctcaggggattggtttgaccaggcatgtcattcatggagcccgtggaaaacgttggccctcccaccccagcgttttaatatgcaaatgcagggtgccatgatattctacacacgtggggatatgtggaggcggccacattgcccagaatatgtggggcaggggcaagggccagaaggccgagggaatgccatgtttgggtggacccagtttctaatggcctgcatttgcatatcaaagattgctggcctggctctaagagctgttttaaaaatgaaaacttttcaaggacccgttttcctctccatctgcctgaaataattacttaataactcctacagcaccactaggcatggaaataatttggaggtggagacattggcaaattcgtatacattcagttaacttcccttccttgtagatatgagaaaactgacccttgaaaaatgaagaaagaaaagtgactttctaagattgaacagccaaacgatgagagtccaatccctttggacctgttttctcacctgtaaaataggtgggaccatatcctaggaacatcctgtctttggcaaacagtacaaaaggagaatttgataaacaaacacatttatcttcatgaatacccaatcctactggtatttacactctggacatatacttcagtctggggagaagagaaggacactgtagagatactcaatctaacaggaaagagaagtaaaagtcttataacttgtatgagttaatttttatcaagagtgaagaaatgatttatgtcgggagaggtgggagtttggtggggagtgaggatattgcagccacgagaagcttgctcttggatatatgctgttctgattggaaattgtattttatccatgtagtagccatccctagtaactgcttacctactttaggacttttagtgaacagaacctgattaaaatataccctcctatatagcctcatattatctttataataaattgccattgaaaactactcagaagatagttaatgtatttttaaaaatacattttaaaaacattttaaaaaacatttaaaaaaacattttaaaaaagtatttgggaatctggatgaagttttagttttaaatgtaatatcttctgagaaaagataactgattcttggtcatcgtttcagtgatctgaaagaatcaatgctcttgtattcagccaacaggaggcaaattgtgaatccaaatcatagactataaaaacaagcaaggaccttaaaaagtatccaggctcaaacccctgcttttaatgataggaaagtaggctcagagaagagcataatatgcaggaataatttcacggattgctgttgtttgcttctttttcatttattaacctattgaatacttgctgtgtctcagcattgttggctgacagagatataatcataaacaaaaccccagaatagcacaaaagcatgttcgcaatgccttcctgacttcttccaggcttatattcccctcttccccaggctctcagcctcaccgaaaacctcagacacatcctgttctttccaacctctctttctttgttcatgttgctggtcctttcgtaatagttgattacaatcgttaatacaagtacatggtagaaaaatcccagaggtataaaaggacaaataaaatgaaaatcacatctctgttttgtctgtgtttcccagtcactcaattcctcttcccagagataaccactgtttctaattatgtattgtcatggagttagttaatggatacgtaaatatatatgcatgtataattggtagtcattttctgtcaccaaatgttaacacgttctgcatgttgttcagtaccttatatttttgagcttaaatgtgtgtgttttcttctaaatttgatagtaaattttttagattaataaggtctctcttcacctgggctttggtatactaagatgatctttaacttaacctgggtcgtctcttaaattatattctttatattatatataaattatattctttaattcaatttaattcagttactttaattctttaattcaattactaattcagtatattcaattaattcatcttgtcattcaaagtcttcagagcctgtttacctgcaatctgtaacctgatttcatgccactgtctaactcacaccttcatatcactcagcccatttccttatttccccttgaacgccgatgcatattcctgcttctgagactccgctagttgtgtttctcacagcattcccttctctctgattacaacattctttgagacttaatcctcacctcctccatgaagccttcacagctgttcccacccacatttgtctcttcctctttcatattcctgttccattttgatataatcacatactatcctttatttcagctcagtgggactcagtcattactcagagtgttataaactatattttcctggcaagttaatgtttacagaaatcacgtagcctctttggacctgttttctcccctataaaatgagaaaagcagtatgatgcagagcaagttcatggaatttggagtctgctagactggggttgtattccaaagtttgcatcatattctatcccttaggcctattagaaaattgctctaaactctgttttttaaaatcttccaaatgtaaataactccttcttcatagcattgttggaggatctaatagaataattgatgagaagctcttgacatacaataaatgccactttttgcatgtatagcatttagtcaagtgatgccaatgtggatgtcaccaataaatattttactgagtattggctatgtgtgcgagacttcgtattgggcactaaggtatgaagatttacatgcttagtaccaggacctggcacatggaaggtacccagaaaatgttgattcaactcccggatgagaaaaagtcccccaaatgcagaatccaatatgttagaacatggatatgtgcatttgtttttttaaaaagtctataaaattaaaaacttctaaatttatcactaaggattgctttaaagtttaacattatattttgaggaaattatgagcctcaatatagaaatacaaagtattcaaaatatgtaaataataattgttcttatgtagatgtaaattaatctctaaggtttttaggacaagttacataagagtccaaaacaattgccaaggccctgaatagggagtttggttcctatattcaaagaacatcaaaaaaactagtgtcgctggggcaagttaagtgagagataaaatgaaattaaaggtgattgtggccctgtctcccagtttctacaggaattaggagtgtgacttcaggaatggcttattccaagttgtaaaactatcccctgtcgtgaaggtaggataaagtttactttttctttgggtaaggccaattagcaaacacaggtggccaatgatcctctcctgacacagcttttaaacactttccagcttttcgtctcagaaaagttgaactccaggcctttctcctctagttcaatagccttgaataaagtctttcttacctgtataactttatatagtgtcattttttctttgacacaatgataatggtaagaagtggtgggatcactggatatattttgaagacaggattttctgataaattagatgtagactgtgagaaaaatagaagactcaagaattatgtcaggccaggtgcagtggctcatgcctgtaatcccagcactttgggaggctgaggtgggcagatcacttgaggccaggagttcaagaccagcctggccaacatggcaaaacctcatctctactaaaaatataaaaaattagccagttgcagtggcatgcacctgtagtcccaactacttgggaggctgaagtgagagaattacctgagctcaggactgagtggagatcacaccactgcactcaagcctgggcaatggagtaagaccctgtctcaaaagaaaaaaaaaaaaggaattctgtcaaaggagtccgtgaacaaatggataaatagagttgtcattgactgagatggagaacactatggttatggcatatgggggcggtgagttgggaaattcagttttgaatatgtgagtttgagatgtcttttagactatacggtaggcttttaaatattgaatgtaagaatttggagttaagaagacctgtcagaactaaagatataattgtgggtgttgttacagtttgaatgttcgtcccctccaaactcatgttgaaatttaattccctatgtggcaatattgagaggtgggacttttaagaggtagttgggtcatgaggacagagccctcccaaataaatgaatctattcatgaattaatagattaatgagttaatgaattaatagattaatgagttatcacaagattgggactggtggctttataagcagagagaggagagacctgagttagcacacttggtcccctcaccatgtgatgctctccactgccttgggactgtgcagagtccccaccagcaagaaggctctcaccagatatgggctctcaaccctgagcttctcagtctccataactgataaaaataaattgtttcattcatatatatatatatatatatatatatatatttcttcatatatatatatatacacacacactatatatatgaagcaatttatatatatatacacacacgtgtgtgtgtgtgtgtgtgtgtgtgtataaattgcccagtgtcagttattctattataaccaccagaaaacagactaggacaggagtcttcaaaatacaaagcatgtatcaaaccaatgcctggatataaagattgtggctagagaggagaagactaaagattgaaccctgagccactacatcagttagtgagataagagaacttccaaagagactgagaatgcatggctccgggtcagaaaatccaagagtgctgctttggaagccaacagaagaaaggatcttcaggagaagggaatgatcctctcagtcaaatgctgttgataaagttaaatgtgagcctagagttggtcacaggattcagcaacttggaggtcacgggtgatcctaactagtaccatttcactggagtgatgggaacaaaaactggactggagtaagtgaagaagagtaggaggtgggacttggagaaactgagtctggtaaggagtttttgatgcaaaattgaatagagagatgtgtcagtaactagagagagaagaggggtaaggttttgttttaggtttgattgtatgttagggatgacagaaataaaagcacagttgaactgatgggaaggatacagtagagaagaatgttttgatgttttgatggcataggagaaagacagaggggagaactgttagagtgaggcatgatgtccctgagtaggggagatgaaagtaaatccagggtctagtgtaccagataaggaattagccaagtgatgagatgcatcatatttccaccaggagaggaggtagacatttcacttcaatagccaaaaggaaggcaaaatatatgggcacaaaagctggcatggatgggggatgtggtaaaggaggtttatgaaaattctcgtctgattgcttttaaattatattttttggctttgaaaaatccacggaactttaatatctgttatgaaggagtaatagggagattttcatctataatatgagttgtagaacactttgaaaaatgaagcctgtctccaaagataattaagtattcccttaattttaatgacacgtctgtgactcattagtggatctctcttttcctttcaaggcaataataaaataacagtcatacaatttaagtattattttctaacatttctatttattacttttattctgtttgaatttttactgttactctttccactgcagtgacaaaaaagaggttattcttaccttatctatatacagctacattttgacatttggatttttaatctaccaacatctagcccaaggcatcacatcctttcaatttatctgaagaatgttactgttgtatttttgaaagagaagaaatataatgtctaataataaaactaatagcaacaataagaataatcagcattaattaactgtttatatactgctaaatgttttacacttcacacagattacatcttttaattctcacaaaaaactatgagttaggaactattataacaatcgttataaataaagtttcggtgccgcaaaagaaatagcacttgaatataaaattttctttgtaattctcagcaagtcaagttatttctatagatgggtactcccttacagagggagcaatggtgagcccacttggacaagggcagggaaggggttcttaaccctgacgcgcgtggcccctgctgctctgtccttcccctattggctagggttagactgcacaggctaaactcattccaattggctgatttaaagagagtgacagggtcaggataagtggtttggcgggaaaaatggttatgcagggtggagaatgagttagggaggagcaggtagcaggtaatcagaatgagtcagggtggagcaggtgattgaaatgagtcagggtggagcaggtaatcgagaaaggttgctttatgaggaagtaaagtttaaaagtagaagtcaaagaattgaacatactgacatattgattctttgaaaagaaatttagaactcatatctaccacacccattatttatattatgcatttgaagttttaaaaggttaaataacttgtctatgtttacactgactaagttacagagctggaatttgaaagcaaattgactactctttacaacaccagattatcccagaaggttgtacgagaaaaaccctaccctttcaaatggtaaaatgtaggtgaattcatcatggcaatggtgttagcagcagtgcgtggtgtgtgttaagttagtgtgtatgtgcacacatataattgttaaatgtggacactcatgcttatatgtaggtttctatttatttagaagtatacatccagtggtttagaaagcattccttatttttttgttttatattcaaacctacttatgtttcattaattcttaacctacttaacaactggttctcagaacgtttagcgggcattattcaggcatctattttagctgatagaagaaatcatattcatagattcctagggttcaaccaataagagagagagagaaatagagtttgaaacagagggtcgaggaggagtggctcaggagttagtggggcctggaaatctgaaattcatggtgcaatctgacaatttggaaacttaggcaagggtagatgttgcattcctgaggcagaattccttcttctggaaacctcagttttcactcttaacgcctccaactgattggtagatgtacacccatattatcaaggataatcttcttcacttaaaatcaattgattgtaaatgttaattacatctataaaatacttttacagcaacctctgggctggtgtttgaccaaacaattggtcaccatgctgtcttagtccatttgggctgctaaacaaaataccataaactgaggtgcttaaaaaacgatagaaatttcttcctctcacttctagagtattggaagtccaatatcagctctggcaaattagacgtctagtgagggcccactttctgcttcatggatggcagttttctccctgaatatggtggaaggggttgagaggtctctggtgcctctttcataagagcactaattccattcatgagggctccacccacatggcctaatcagctctcaaagaccccaccttctaatatcatcacattagggatttggtttcaacatatgaattttgggtgagcacacacattcagtctataacaatagcctagtgaaggtggcatataaaattaactaccacagtaaatattccttgtgataagataaataattcctagattactgcagaaaatataatactgagtattacatacatgttgagaggtgttcctgagcactgctgcatgtttggatgcttgttcatggcaacagtaacttctcaggtattttgcttaataagcttttatgtctgacatgcagagaaaaacatagtctatgtttgcagtagcaattatagtagagactgctctccgtggaccaaaacttgtgcttctcctttcatgttatagagctgtcagctggatgcagctgcctagccagggactacctgtcccagatccctattccttaccttcaggcggggcaatgtgactaattctcacaaataaaatttgagcagaagaaatgttagtttcaggctgatatggtttggttctgtgtccccacccaactctcaccttgaattgtaacaatccccatgtatcatgggagggaccagttggaaggtaattgaatcatgggggaggtttttcccgtaagttggtctcctgatggtaaataagtctcatgagatctgaaggttttataaggggcagttccactgcacatgccttcttgcaggggcaaggcaaccctttgcccttccttcatcttctgccatgattgtgaggccgccccagccatgtgaaactgtgagtcctttaaacctctttcctttatttatttccttaaattacccagtctcacgtatgtctttattagcaatgtgagaatagactaatacagtaaattggtatcaggtagttgggcattgctgtgaagatacccgaaaatgtggaagtgattttagaacaaagtaacaggcagaagttggaacattttggagggctcagaagaagataggaaaatgtgggaaagtttgaaatctgctaaagagttgaaaggctcagaagacaggaagatgtgggaaagtttggaacttcctagagacttgttgaatggctttgaccaaaatgctgatagtgatatggacaataagatcaaggctgaggtggtctcagatggagacaaggaaattgttgggaactggaggagtaaagatcactcttgctatacttaaagactggtggcattttgcccctgtcctagaaatatgtggaactttgaacttgagagagatgatttagggtatctggtggaagaaatttctgagtgataaactgttcaagaggaagaagagcgtaaaagtttagaaaattttcagcctgatgatgcaataaaaaacaaaagcccattttctggggagaaattcaagcctgatgtagaaatttgcgtaactaacaaggagcccaatgttaaccactaaggccatggggaaaatgtctctagggcatgtcagagacctttgcagcagtccctctcatcataggcatggagacctaggaggaaaaaatggcttcacgggctgggcccaggcccctcctgctgtgtgctacctagggacttggtggcatgtgtcccagctgttccagctgtggctaaaaggagccaaggtacagctcaggctgtggctccagagggtgcaagccacaagccttggcagctttcatgtggtgttgatcctgcaggtgcacagaagtcaagaattgaggtttgagaacttcctcctagatttcagaggatgtgtggaaatgcctggatgtccaggcagaagtttgctgcaagggcagggccctcatggagaacctctgctagggcagtgcagagggaaatgtggagttggaggacccacagaatccctacaggggcactgcctagtggagctgtgagaagaggaccaccattttccagaccctagaatggtagatccaccaatatcttgcactgtgcacctggaaaatttgcagacactcaatgccagtccatgaaagcagccaggagcgggacagtaccctgcaaagccacaggagtggagctgcccaaggacatgggagcccacctcttgcatcagtgtgacctagatatgagacatggagtcaactgagatcattttggagctttaagatttgactgccttgttggatcttagacttgcataggacctgttggcccctttgttttggccaatttctcccattttgaatggctgtatctacccagtgcttgtactcccatggtatctaggaagtaactaacttgcatttgattttacaggctcataggcagaagggacttgccttgtctcagatgagactttggactgtggacttttgggttgatgctgaatgagttaaaactttgggggactgttggaaggcatgattggtttttaaaaggatgtgagatttgggaggggccggggcagaattatatggtttggttctgtgttcccacccaaatcttaccttgaattgtaataatccccacatgtcatgggagggacctggtgggagataattgaatcccatgccatttttgtgatagtgaataagtctcacagatctgatggttttataaagggcagttcccctgcacatgctctctttactgctaccatgaaatacatcccttttctctttcttaatcttccaccatgattatgaggcttccccagccatgtggaactgtgagtccattaaacctctttcctttataaattacctagtcttgggtatgtctttattagcagtgtgagaacaaactaatacacaggctaatcctgtaaaggagaaggttgtctttctccacacattttttccatctactgaatggagaagactctgagatgctaagaaacagtggaaagacagggtggaaggacctaggttgctgaagcacctcgtggaataaagtcactgccaacagagctgcctccattgagcacctgcatgaataagatgtgctgttgtattatgttagcagctctgtgtcattagacacttgcatgaacaaggacaattatttcatcatgttaatctattaaactcttggagtaagattatattaacctgaaccaagacaaaactgggagtacacatttggaccttcacatcagtaaactggttctttaggaaggggtctttcctagtgactaacctcatagctgctttctggtttttgttttgttttgtttttcagtgatgctagaatgtaagctgcatgtgagcaggaatttttgtctgttttgccattgatgtatctgaagcaactagaagaaatacctggcataaggtagcattcagcaattagttgctgaataagcaaatgagcaaaaagaaaatattatcttctaactagtgattggactgtcatcatgcataaattgaaaaaatgcaatgtaaaactatgaaatagatttttatataactgtgtttctctatctccataaatagaatgttacaaagttttatgttattaatggtaacaaaataatttctgaaattttatggcatagttttcagagttttttgaaaactacttggcagctctaaaaactgcaagagtgtcacataaatgataatgcaaagggttaataaggaagaggtagcgttgatcccataaggcatggaagattgtgtgggccttcagatcaaaagggagatgtgtatatatgtgtaagaatatcactgtgtcataagagattaattgtttggtttaagttacatctcaaaaagtaatacactgcatgaagtggataaagaactgaagatttaaccctggggaacagttgtggctgtaattccatgacttttactttcttctataataaagtttaaggagagtctgaaaatttaggataaatgagaaataagcttagtacaagcagtgggtggggggctctaaaaggtaattctctgggcatcatcatcttggctgaaatgggcatctggcatctacttggtctggatattaacttatgtaaatctctgggagcttcatttccttgggtaaaggaaatgaaataaaaaactaaaaatgagtgaaactacacaaatgaatgaaaccacgtgtaatttactatactataggttgaagaggaaaatatatacaaaattcatgactaccatacagtatctttttggtattaatgtccgactttccctcttcactccttgcccctctctccccaaacacacatgtatagagaatcactagaaatgagtgatagatcctgagctaaatttgtctacaggacatttctgccatggtcaagtttgtatcttattaggctttcaccattttgttcacaaattccattttatggagtctcaaaatataacatttcatatccctagcacagaatcagtggcagaaattttccatatttccattcacagctcgtatgttatatcttcatacctttctagaacccttttcactgcttgtcctgcctacatagatttatataatttggttctttaggggtttccctctttttcaatagccctctgctattatggcctcagggataatttacttctgtgtaaagtcacccatgtgctcctttctttttaaatgcctaaatctctctggtcataacttgtatgtctctctgccacgcttccacagtgggaaggacagatttccataataaggctgaactaaaactggcctcctagttgcattctttcctgataaaagtgttcttctttctaatgccattaaatatttcccttggctgcaacactgtattttactgtttgaacatgcattaaatatgccttctttctttctttctttttttttttgagacggagtcttgctctgttgcccaggctggagtgcagtgacacagtcttggctcactgcaagctctgcctcctgggttcacgccattctcctgtctcagcctcccgagtagctgggactacaggtgcccaccaccacgcctggctaatttttgtattttttagtacagacgaggcttcaccttgttagccagggtggtctcgatctcctgacctcctgatccacctgccttgtcctcccaaagtgctgggattacaggcgtgagccaccgtgcctggccccttctgtctttattataggagatattattatttccgtgatagttcaggaaccaagtctcagaggaatataggggtgggttagactgggtgttgctcactcttgtgatgagttccagacagatgaccctgtaaaaagcattactggaccacccagaaggcacagcctaagaaggccatccttctgggaatgttgccacacctttcaatgagctacagagctaacccatggtaacaattggtatggaggcacactgtcttattctacctgagaaacaggcataataaaactgtagaattccacttagcctgttgtatcacatactatttagtttttttcctgaagcctacctaccttctccctctcaatttttggatttttttatcagctactctgtccttttcatttttcctggactttctctattcctcatttttgtttttatgaaagcatggccttttaaaatgcccacatataacactcttaagttcaccagataaaacaataacaataattacaaaaggtttcacttattgcgaatgctttatgtatattaatacactgtataatctttgtagcaaattcatgatattagattgcttttctttttccccattttactgagctaaactgaaaattagagaattagcaagttgttcaaagccacatagctaataaaaggcaggattcaaagcttggtccaattgactcgagaagacatgatttatggatccaataaataacgagtgagtgcattggtgatagagacacaacaatgacaaaacaggctgatcactcacctcacagagcttacattcctctggagtgtcaaagaaacattacaccagacatattaagcagggaaggaagactttattcaagactattgcaatagaagagagagagagagaaagagagagagaaaatgaactcaactcccgtaacacagaaccctggagtgtttttcttatggggatgaacaagtagaaaagtattggaggaacttaaggtgtctatgtggtcagatcatttgtgttgctaatttggcacttatggaagttaagcttctaccttaccccagagactggaagatagggatgcaatttttcttgatgattgcactgcaaaggaatgaatcccaggtacttaagaaagacattcctggattgtcaaactgataaaaggctgggagaagatttacatttcaaaagggcagagaaagaatttacaacagcaaattttctactgtaaatgcttgaagaaaaggaagatgggacatcaacagtcaagaagaaatctgtctaaagtttagtcaagctaaagaaatcattaagatcatcttggtcaggagagagacaaaaatatgtagtgaatgtcctatcaagcaggatacagatgttgcggtgggggagtttctattttatgtggttatgtgactttgtcctagtttctatctagaatagaggttttaagctcccagttcctgatttatggagaagctagttgatattaaggggaaatatttcctgaagacaaaaacattactactgacttggtctttactagaatacacactgccagattggttctcctgatttatcccctgatcccagggcttttcagccattatattcaatgcacattattttcggaccattagcataagcaaataggctactattgaccaccctgaccgtcttctcccaccccaagtttctataccatctaacccaagaccttgttataaccgtctcttagataacatggctatcttctcgttctccttaaagaaaacatcccaaggcacttcagctccctcctaccccttccaaatctggcatatttgcctaataagcctaaatatacagtgttcatgtattccattttctggataatagcattatttatgcaatctctaaaagacagaaaagacacttcagcactttaaaaagtaatgtccccacttgggtaatcaagcagactttttaggagccctctcactggctaaatccggaagagcaactgcctaatagcaaatgtaatctccagcagggcacctctatgccattatactattcttattatcctttttttgtcaaaaaaattttacaaagctacatttcaaacataagaagactgaggcttaaagatttttattcaagccacgtagctattaagcaggagaactgagatgtaaacccaggttattttaattccaaagatgtgttctttgaaatttttgtttccattattacatgctactaccaatcaagttttatttttggggataggggaataaaacctaaatattatgacttttatttgttcatggaaaacataggcatttttaatgatatcgcaatgaaacataagaaatattattctggtctaatgtagggtttctcatggggttcaataattattactgagttctctattcaaatgttcttttcataatagatcacttgggaaaaggctaaatgatatcaattagtcatttttatttcaacattaggaggaactattttaccagcttattcttttcctttgtggctttataggctccatccatcttgttctctttagagataagaatattgcagaaaatggagagtaccacagggcaaatttcaattactctgtggaatattagctattttaccttgtttgcttaagaggttttttttctgattaaagaattataatttaaaaggcagaagtaactgttcctttcatattacttcacagttcatctctcttctctctggggctgacttatgcccacaaggctgattctaattcctttttttttttttttttttaagacagagtttctctcttgacacctaggctggaatgcaatggcgcaatctcagctgactgcaacctccacctccgaggttcaagcaattctcctgcctcagcctcctgagtaactgggattacaggcgcccgccaccacacctggctaatttttgtatttttagtggagatggggtttcaccaagttggccaggctggtctcaaactcctgagctcaagtgatccacccgcctaggcttcccaaagtgctggaactataagcgtgagccaccttgcccagctggcagtttctaattcttttcttggggaataatagttggtgtatccctttgaaaaactggtcatgcatcattgtacttctgtctcccacctttttaccctagaatttattctgaatatttcagaaaattcagactacatcttctatagaggaatggggtttgaaaaatgaaaacccaggcacttgtatagacataggaacatccaagatgtactcatggagatagtgctgtggctgctatatttcggatgctctgttctgctgcagctatgagcctactgaggctttgagccttacttgtcattggcttatccctgctcgaatgggagtagaaagatgtgagatccttagggcacctcagtgtagccctgctacacaagattctccattatggcaccagttagagggaaagtgtgaaactctctaactcaggagatatttaacgatcagtatcagtgctgtgtatttgagagggtggcctctgggttctttcaggaatggttggttgacatgattgaatcacacaatttcacaaggagatggaccgtaaaaggctacacagtacaatcattgtcaaactccagaactactaaaaaagtcactcagggatgagagttaaacattcaaattcctatatcatatcctgataacaataagtttccctgggtgtctccagagtctgtctggtcataaacttcttaagtatttcttagttagctctgaaactcaaaaagtatttgactaaatggtgaaatggtgcaatgtacctttaaaaatttgaaaatgacaacaaataattcctgaatgattttattaataatagtctgctaaaacctaaccagatgttaacttctatagattaaaaacttattctgttttctcctgaatggatggattcctacctgatttgatttttccttgcacagacattctgtggctgtgtccctcgtgggaggacatgaaaagatggccattctagagaacagattctgttgtggtgaagggtacctttgctcctctgactggatgcagatatcacagtctgtaggaggcaaggaaagctctgcttttagcctcactatcctctcacccttcaaattcttgacagagtgcatctgaaaagtaaaataattgtttccctcatgactgcagcacagatgaaatgaaaaagactggcctttccccgactcctgagtaattaatttagtctaatgtgtctgttctagcatccaagtactgcagcagtaggcgccaggcatatgtgcagatagcttgagagagatcatgttattcagataatctagttagcccttggtccacccaatgttaacagtgacttgaagctctcattcattatttaggctaacaatatcttacatgttagagcaaattttagcatttaacacactttcataaatactgtcaggaagctggatatatgggaggaagtttgtatgacttgtttcatggtctgacaacccagaaagggtcagagttgagactcaaatgcaagcctcgagacttcaaatctagtttccctctaaaggacatgagggtgtatgtaatacaattttttcagttcctatagttatagaggaaatcaaagctctggttccaataagagtgttatttggctcaaatccacacccagattaaatgagactctagagtcactcctaactctttatcagggcttggctccttctgaaaaacactccactgtctcctttatccagttagagttctagggaaacttatttgattagcactaaaacccagagtcatagtataatatatttcttttagcaagtcctgcattaaacaaatacttgtgtattcagcatgtgctatgacctgggtactgtgctgagaacagggaacataatcagtggggagcaggggaaaacttgcgtgtcttctttgaacttatagtagatttagaagaggtagacatatacatagggtatgggcatagagggctatttctgaatgagatggatgtatagagataaacagttgtctgggtgcggtggctcacgcctgtaatcctagcactttgggaggctaaggcaggtagatcacaaggtcaggagctcgagaccagcctggccaatatggtgaaaccccatctctactaaaaatacaaaaattatccaggcatggtggcaggtgcctgtagtaccagctactcaggaggctgaggcaggaaaatcacttgaacctgggaggcagaggttgcggtgagctgagatcattccattgcactccaggctggtgacagagcaagactccatctcaaaaaaaaaaaaaaaaaaaaaccactaggctaatcaataaaggatgaggaggagttaggtaggtaaatgcggatgagatggagagaagttcccaggcagaagggagcagcaccatggggaggcctggactgggaagccttgtgagatcagctgttgcttacgttcgagtcactgatgtgatgctgccacaaacctccacatctgtgtgcatccccttccctttccaaacctaatcgcaggcctctggctgctgccctttcttgccccccactctgttccctgatgcaacttacctcttcaacctacctctgctcctttatttgcaagcaagggagactgtattaggtagagtaatgactccccaaaagatgtccatgccataattcccagaaactgtgaatatgcaaggacatgccaagtaggtagtaaggttgtttacagaattaaggaaattaatcaattggcttcaatatagaaaagtgcctggattttccaggtggaaccaatctaatcacatgagctttggaaagaagagggaggtggaagcgtgggccagatggtcaagacactagaatgattccatactccagtgttggctctgaacgtggagaaagcaagccatgaaccaaaaaaactggtgtcccatagaagccaggaatggccctcaggaacataccagcaacaaaatatgaaccttggtccaatccacaacgtgaatgagcaggaagcagattctctcctcaagtttctggaaaagaatacggcctgccaacattgtgattttagtctaatgagacacacactggccttctgacctacagaactgcaagataataaatgtgtattgtgtgaggctgctcaaattatgagaatttcttacagcagcaatataaaactaataaaaggctttctactggaaaatgggaatcttctatcagacctgggatggccccaatttcaaggttacaatataggtcacctgaactgcacccctaggggagcagtgtatacccacagctctacacgctgccttgctgcatggaaataacaccatagcttttgcagacatattgaattcagtcttcatccttctataaagaatggcctccaggaatcacaagagatttatttgtgtggttccaatatgtgctttattctgatcccctgtcctaaaaagtctggtcctgagtcttgagtaagctgatttcctttagttttccctctgagagaaagacctgttttccgccttgctgaagcactttcccctgggctttgtgagggagtttctgtctctccatttcaatgctatgatgtttatcttcatgacttgaaacctaaacatactttccaaaattctctaacaatttttttgcgtttggagatagaagtggggccaataaaggtgatagtgtggtcagctggtgggattttagggcctcttaaaatttgctacacatgatgcatgttgggctccactgccaactgccatacacccatagagatggaaaaagaaaaaaatttgtaaaatcaaaagcacatttatgtccttaaaattttaagatggcattataaagacatctctgtcattttcttcctacagaaatcaactcacaataacagaaaaatctaaaaaatagaaaatacaaaatccatctatgatgaaacaaggggtcatcttagccctaaacaacaatatataaggaaaggctgctaaggaaagattacactggggtctaggaagacatagagctctctccataccactggggtgcatgctactgcagatctcaaactagcaaaacaccatcattttctaatggaaatgcataccgagggaaaaaaacctctttgcgttttggcttaaagggattaaatagaacaaggtgcatatcttactgaggttatcgttgaagactgagtgtctctgtagagtaataggagagttagatctaagagagaaaactgaaaatgtcatgactgcatgtagatgacacaaaagtagaaagaaactgaattgtgagcagtttagacaggccaatctgctgtgagtgctcagaaaaatatgctaagaaaaatcatgcttatacacacaactccgtaacatcagaagtttcactgagaatgagactaaaatcctgctcactttgccttctctggtccctttagtacataaatttccttaaaataactgaaccaggactgacttaggtcattcaaagtgaataataataaataagaataattaccacaggtctatataccttactactaccactgctagtggggaaaagaggaaagaaatagaagtgagaagaaatgatagatgcaagtatctccattgaggaaatgacaatccataacaatctgaattgtaagttttcatgaaattaacaaaaaacacaaaccagagatctaagaggttaagggagatacagaaaaaatacaggaggatgataaactagtagagttccagataaaagtggtgcaaaaccatcacataaatgaaggttacattgaaaccaacaggagaatagaatagatgccacttaaatcctagtaatgacacagaatgtaggattgagaaaagtgaggatagtaaaatatagtaagcaaggatgaaaaggattagagaaaatatgttagatatagatggcagacacagaaaatgtgatgtatacatcattgggtccctcaataagcaatctgatgaattaaagacaaaaatatccaaatatataattcaaaaaactttccagaatgaaatccagttaggatccacagatttttttaacaatgttctctgccacaggaaaaactggtatagaatgatcaagctgtgacatatccaagtatatattactaggttcaaacactaggaaaagagtcccttgatcatttttgcaaaaggaaaaaatcactgtcctaatcagcatgggctgccataataaagccccacagactaggtggcttcatcaacagaaagtccttttgtcacagctctggaggctggaagaccatgatcaggatatcagcatggtcaggttctggtgcggagcagcttcctggcttgcagatggccaccatctcattgtgtcctaaaatggcagagagtaaacaagctctggtctcttcctcttcttataaggacgctaaccccatcctggggattccactgtcacagcctcatctaaaccttattatttcccaaagaccccacctcctaatcccatcacattaggggttagagtttcaacatacaaacctggagaaacataggcattaagtccgtaacagttatctatacagcataaaaattggttccagtcttatacctcttcatagatacactcacagcactaaaagacaatggactacactaaagaaaggaaagaaacaccctataactttatatttagcgaaactgtcacaagatataagagccataaccctacatctttttaaacataaaagaactcaggaaatataattgtcaacaagattgtttttatagaaagtaccacagggtagccttgagaaaaccaagtaatgaataaagaaaggaagggactagtggtcagttctgagttcatttaactcactaagaattaatacttaattaagctgtgcttaagtactaattaagctgtgcttaagtattaattcccctctgtggttgtagaggggaatgtaaatgtttaaaataatgataatgtagttctagtataaataatgcaaattgggagaggaagtgagagataaggtagaaggtagtgatgaagactgttcttttcataatagatgaaaaatgtcaccaccaataaaattacacaaaatactgagtggatcacatatttacaacctcatcactggcagatggagtaacataattgaaatattgaagcaattttattcttacacaaacagagggtcacatttcaggctgaccttctaaaaaatattttatgttgtaaggagctggatgaacctctggccgttagcccatttaaattatttctggaaccaatataaatgaataaaaacattcaaatgtttacatttatctcacatttatcatgttttctactttacccttattaacactccaactttcctcccaccatggaatttggttaaagattatcctaattttgaattacttccaagattattttcttaaaaaatagtgcttattttcttttatagtaattgtaattttgggcaaattttgtctggcatttacgggtatatattggtatacactgacaaaattcataaatgactgcgtaccaattttggatgggatactcagttatacattttgctggaatttgtgaaataatttcacaagaagttttccttgataaacaacactggaaaggaaatttgcaaaattcactgcatcatatatgtatgtatatatatatgtgtatatatatatatgtgtgtgtatatatatatgtatatatatacacacatacatacatataccactctatgttttcttgcaaaactatgatcctctttggtctattcattagtgatactggggtaaattattaaataatgctatgcattaacatagcagctttccctactgtggctaaaaactcaatttaaaatgatctatcactaggcaaagagggaaaaatctaaacatacaatgatgctacattgtcttctgtgttaaccttgattgcttcttgacctgtgtgtaggcgatattattaacagttagaaatactctattcacgacagctacaggcaatggtatccttggaatgatagattaataatcatagagttagctaattagtttaaatattatttatgtcagaatctaagctcatttctacttattctgaggcaaactctttgaatatgaaatatgatttctcaggactcttacaagaaaaacatcatatataagattcatatatggaaacacaagctgataagttagggaaaaatattttaaattggttgatacatgggagtagggtgtggagaggctattgattgggaagggacaaaagagaacactctgaggtgatggaactattctgtgtggtgttaggagggtacgtatttctcaaacagaccgtatgaaattcttaatctgagcattttactctatgtaagttatacatcaatagtaaataattctttaaaaactcactaaaaattacccctgtaaattccacttgatttagtttatcagtgagttttgaaaatacaagcagggatggtagcttgaattgaaaacactatttgaacactaggatttcaaatctgagactcctaagaatttgattacaaattattcagtatccatttcactcctgtcagacatgcataaagctaagatactaacattaaccaaacttattgggctgtctgaagaataaattaattgaatatctctaaaacacttagcaatagaagcaaatcattctttgtatcctatatagttaaacttgatgtgcaaaatgaaaagtcatcactctcttcgacacttgttattctcatttatgctatacattacatttatagaggtaaaactatgtaaaatacatgtaaaattggggacaggtcattgttattttgcataatttatttttggtgagcagagaacctttttggtcaatttatataaatactatagtgtttttgtcattataaccaggagaccaatttgttgaattggacagctggaagcaaggaagggaaaaagtatttcaccgaaaaggcagaagactggcatcaattgcaagctgtggaatcaagacaactttggctgagtcccattttatataggactaaaggagagtgcagtcctcaaaggcaataatatttatgagaacaaagaagactgtggagaaattttaggcagtagaagagagcagaaaggccaagaggatcagggttgaagtaagctatatagcaaatcaggcattgcccagttacctgggaattacattcaggcaaagcagaaatacctgaagctagttgcttatacaaccaaatattgagaagtaaagatattttcatctagaacaatcctaaaaatcactcttgtttctaaaaggccaaaggtagtgggcaggtatacaaagaaagggatatttatgagagagggcctgacatttaatctatttatgtaagtgacatcaatacatattgtcaagcctggatatgacataattaatcattaatacaacctaattgcagaagttctttttaaaaatagagttatgtctcagaataaagaaagatccctagctccaacacttattgcctctattttcttgggcaaattacttcaactcactaagcctcagtatgctacagtaaaatatagataataatagtacctacttcataggatgtttgggagggataatgataaaatgcttgcaaaaacatttagcatttagtacttagaataaagtaagcacccaatagatgttaaaatctgacatatacacacacacacatatatacacacatatttacacatatttgcatgtgtgtatatatatatacatatacacataatataaatatttagcaaaatagaaaaatttgacaaatatacattaaaaactctacttgttacttatggaagagactggctatctaccacatctgtttccctttccttctgggtccacagctatcttatgtgccttaaagtaaggtattgcaggtatggagttcctgccactggcatgagtagcatgaatgtgtgctgcttctagatctggcaggtgaaaaccttccatgaattcctctacctgttctgtttccaccctgccagctcaatgttgggagtcattttccaaagaatggcaaggctctgatcattggagactcagaaaggtggagggatggcagaagggtgagggatgagaaattacctaataggcataatgtacactattcaggtgaagattccacgaaaagcctagactttactgcatgcaatatgttcatgtaacacaattgcatctgtatccctgtaatctcttaaaaaaaaaaaaaaagaatggcagggctcaaatctgactgcaggaactgagtgctaccactaccaccatctccacccttggttttgtttcctagagttttaagtacttgaaaaatatacttctattgcattaaggccattgaaatttggaacgttgcctattgtagtaactagagttaccttgactaatacactgctgaatccaaatggtgtatacattatggaacaccagtttcaagtttttgctgagtgtatgaatagaataagagtgtgtcattcagaattttctttggttcctcgtaatagaacaccagttgccagcagctttaaaacctagttgtttatttttattataagaatgtaggtccagaaatagcagttgttgctttatttcagcagtcaatatatctggaattcccttgcttttccctcattattaccatatgactgctgtggttcctaccatcatgtctatgtacaaggcaaaaagaaggtagaaaacctcactgtatctgtccttttattaggaaattcaaagcttacttaaacttagaagacaactcaagttgcactggcagaattgtgtcatctggtcaccaatagccacagaaaagatgcaaagtcagcatttgactgggcaccttattgctctagacataactatggttctgttatcaaagaagaattgaggaatggctattggctaagtaactgacaatgtctgtaacttatagtggtaacaatgaactctaacctgactgatttttagttcaggctatttgtctatacagctgatatcaaaaaacccagaaaaggtcagaagggactgtgtttttactaaattccaaaagttaacagaaataattatagctctgaaaaggctataggttgtcacatgcttataacttctgcttccacatggaaagccacttgacatctgaaaaccctgctctctgttcacgggctttctttgtttttgttcaccacatgatgagacagagacataaaaacattttatctgttaacttttaaaataacttgaaaggaaaagggaaagtatatttgaaattatttgggttaaatccttaaagtctctaatatactatatatttaatcacgttttaatgttttcattttctttttcaacttttcttttaggtacagtgggtacatgtgcaggtttgttgcatgggtaaattgcaacaaacctgcacatagggtttggtgtatgaattatcccatcacccaagtcttgagcttagtacttgataggtagtttttcaaaccacatcttcttctctccattctcctctagaagtccccggtgtctattgttgtcatctttatgtccatgtttacccgatgtttagctcccccttataagtgagaatatgcagtatttggctttctgttcctgtgttaattcatttagggtaatggccttcagctgcatccacgttgctgtaaactagttaatttttgttgttgttactgttgttgttattgttggagacagagtctcactctgtcacctaggctggagtgcagtggtgcaatcttggctcactgcaacctctgcctcccaggttcaagtgattctcctgcctcagcctcctgagtagctgggactataggcgcatgccaccatgcccggctaattttttgtatttttattagagacggggtttcaccttattagccaggatgctgtcaatctgacctcgtgatccacccgcctgggccttccaaagtgctgggattacaggtgtgagccactgcgcccggctctaaagtacataattttatttctttttatggccacatagtatttcatagtgtatgtgtaccacattttctttaaccaccattgatgggcatctaggttgatttcatgtctttgctattgcgaatagtgctgcaatgaatagacaaatgcaggtatctttttggtagaatgatttattttcctctggttatatacccagtaatgggattgctgggtcaaatgatagttttattttaagttctatgggaaatcacactgctttccacagtggctaaactaatttgcactcccaccaccagagtatgtgttcccttttttccacaacctcaccaacatctgttattttttgactttttttttttaataatagccattctgactgatgcgagatggtatctcgttgttttgatttgtatttctctaatgattagtgatgtaaagcattttctcatgtatttgttggttgcatgtatgtcttcttttgagaagagtctgttcatgtcttttgcccatttttggatggagttgtttgttgtttgcttgttgaattgtttaagtgccttagagattctggatattagacctttgtcagatgcattgttcgcaaatattttctcccattctgtaagtgtgtttactctatcgataatttcttttgctgtgtagaagctctttagtttaattaggtcatgctcatagatagaaagaatcaatattgttaaaatggccatactgcccaaagcaatttatagacttggtgctattcttatcaaaccaccaatgtcatttttcacagaattagaaaataatattataaaattcatatggaatcaaaaaagagtctgaatagccaaagcaatcctaagcaaaaagaacaaagccagaagcatcacactactgacttcaacctacactaaaaggctacagtaaccaatacagcatgatactgacacaaaaacaaatacacagatcaatggaacagaatagggaatccagaaacaaagccacacacctacaaccatctgatctttgacaaagtcgacaataacaagcaatggggaggggactccctattcagtgaatggtgctggtataactggctagccatatgcagaagattgaaactggacccctttctttcaccatgttaaaaaagtaactcaagatggactaaagatgtaagacctaaaactataaaagtttcatagaagaaaacctagaaacaccattttggacatcagccttggcaaaaaatttatgacaaagtcaccaaaagcaattgtaacacaaacaaaaatggacaaacagggcctagttttaatttttaattaaattaaaacaggtaatagtcttgtttagtttgagtgtttaagtacaatgaagaacacatcgacttgttttctcatcttattgggaatttctaaataagcaactctgctatatgactcattaataaaacatatacttttgccctgtgaaaaacaccttgaagctgcttttatatatttatgacagatttcacttgctgtcatgactcatggatggtaataattataatttatttgaaggtcattgttttcttttcttagtatgggggtagttttaaatgagacattcaatctaagctgaaaattttaatgtactatatatatatatctggagtatttatattttctatttattttccttgtaagtattttcttcaatttaaaaattattatgtgtaagtatatttgcataatatattttctgtgattacttgttcatttatagtaaattataattattttaatgaattttcatataaacatatttgttacttagggaaatttatccaaagccttgaattttttgtttgtaaatattccaaacaaacattaattattgccaacttttacagctggtcaatatttttttagcaagagcagaaatttataccattgtcctgaaaggaccttaatagatatcaagtagtctgcatgatatacagacattgcatttcaactttataactcaatattatggtttccttattatattgtgcttgctaaaggggaaaatactaacattattgtcagcatggcacacataattttcacctaaattagttgatttctgcaatgctaccatatctgctgcctgtaaaagcataggaagcataattccatttcattttttattaaatgattgttgcaaataagttataaattcttctatcttaaaaacaaataaagccagccttgaccccatatccccttcatctatgattccctctccaattttctttgttccttgttagcaaagcttatcgaaaagtggcctatacttagattctgattgcctctctcccttctttttcttgaaaacactaaccaggtcttcatccccatcactctgttgaaatcttaatttcttaggtcaacactgacttccatattaccaaataagtcaatcatcagtcttctgattacttggtcattctctttcttgaagcactttatttcattgctttccaaggaatgcacctctcctggattttctctaaccacactggcttttctttctcagtttcaggtgttgagtcccttcatccttctgacctcaaaatgttgggttaccctagggttcagtctgggaccccttttcttttttctctttcttcttcttcttttttgtttttttttaaggtggagtctcgctgcgagacccaggctggagtgcagtggtgcgatctcagctcactgcaacctctgcctcccaggttcaaatgattctcctgccccagcctcccgagtagctgggactacaggtgcatgccaccacgcccagctgatttttttatatttttagtagagaaggggtttcaggatactggccaggctgttgttgaacttctgacttcaagtgatccatctgcgtcagcctcccaaaatgctgagattacaggcatgagttaccgtgcccagccttttttttcttttttgacacagggtctctctgttgcccaggctggagtgcagtgatgcaatcacggctcactgcagcctcaacctcctctggctcaagtgattctcccacctcagcctcccgagtagctgggactacaggtgtgcaccaccacacccagctattttttgtgttttttgtagagacagggtctcccgaggctgcccaggctggtctataactcctgaactcaagcaatccacctgccttgacctcccaagtgttgggattacaggtgtgagccaccacacctggccagggacccccttttcttcttaatctatacccactatctagatgatcccatctaatcccatctgtatgctgatgactcccaaatttacatttctggagttttgttccttgatttgaatatccaaactagctacatgataccttcttttgaaattaacttttccagaattctttgttttcctttccagtcttgatttcccagtgttctccatttcaataaatggtaccaccattcattctgttgctcagtgccatccctgattctatttttttccacagcctcatccaacacatcttgtagtttctccctcaaaacacaactgaaatttgatgacttggcattctgtgcaactactctcatcttttttctgaacaactgcaacagctcttaaactcttcacccttgttccctaaagtctattgtctacgtaggaaaatatctatgttacacgatcttgtgcagtcactgctattaactctccaattttacacgtgagacttaaaatgaaatccaagtctgtgccatgccttatgaggtcccacaggtcaaattcacatggttattctctaggtattcacatggtttgctcattcactctttttaggtttatctcagtattctttagacaaacttctgataatcctatgtaacagcttctatcactctatcctcataccctgcttagaggttttcgtacttttaatcggtgaacattacattacatatgtacttgtttatctgttcagtgtttctcttccctatgaaaataaattgcatgagcacaggaactttgctttttccatttatgtatactcagtactaagactagcacttgacatatctcatctatttactgggcttccatataatagataatcattactctgaccaaaatcattcctatatctcacaaaaaactatgtatttttggtgtccttggaatttttttctttttttttttttttttgcaagacagagtgttgctctgtcgcccagactggagtgcagtgacacgatctccgctcattgcagcctctgcctcctgggttcaagcaattctcctgcctcagcctcccaagtagctggtattacaggcgtgtgccaccacaaccagctaatttttgtattttagtagagacagggttacgccatgttgactaggctggtcttgaactcctgacctcacgtaatccacctgcctcggcctcccaaagtgctgggattacaggcacgagccaccacacctggctgtctttggaatatttactaaacttgcccactacccagggagattagacattttctcttcttttaacaaaagaagatatcattgaaaatgttgacaaccacctttataactagcatggagaagataagttgacctggacagatcttctttgttctggaaagagtcacagctttggttatgtactctgagacatgagttacctgattatctgggaatggtagagctagttcccaatatttgtcataaggtatcagaaaaaaaattgttattattaattaccctgaatgttttaagaatgcctatatcaggcttggttaacacaattgccttttctttatataaaagtaaaatttaaaattattagaaaataataaacctgtatcaaatgtcacaataaggtgtttgaaaatgtatactgggtgatatgacttggctctgtttccccacccaaatctcatctcaaattctaatccccacatgttgacagagagacctggtgggagctgattgaatcaagggggtggctcccccctgctgctctcatgatagtgaaggagttcccatgatatctgatggttttaaaagtggcagtttcccctgcatgctctctctctcttcggccacctgtgaagaagatgcttgcttctccttcacctactgtcatgattgtaagtttcctgaggccatcccagtcatgtggaactgcaagtcaattaaacctctgttgtttataagttacgcggtctcagaaggcaagagttgaggtttgggagcctctgcctagattttagagaatgtatggaaacacctggatgtccaggcagaagtctgctgcaggggtggaaccctcatgaagaacctctgctagggcagtgcagaggggatttatggggctggggcccctaaagggtccctactgggactctgcctagtggagctgtgagaaaagggggtcaccattctccagatcccagaatggtagatcccctgacagcttgcaccaggtgcctggagaaaccacagacactcagcgccagctcatggaagcagctgcaggagctgtatcctcaaaagccacaagggcagagctgcccaagtctgtgaaagcccacaccttctatcagagtaccttggatgtgagacatggagttaaagcagatcatttcagagctttaagatttaatgactgcccttctgggttttggacttgcatggggtatgtggcctctttgttttggccaacttctcctatttggaataggaacatttacccagtgcctgtattccattgtatcttggaagtaactaacttgcttttgattttacaagctcagaggtggaagggactgtttgttgcaaaggcatgattggttttgaaatgtgaaaaggacatgagatttgggaagggccagaggcagaaatgatatggtttggctctgtgtccccacccaaatttcatatcaagttgtaatcccgtgttaagggagggtcctggtgggaggtgattggatcatggaggtggtttcccccatgctgttattataacagtgagagagttctcacgagatgtttgtttgatatgtctggcatttcccctgctctctctctttctctcctccactatgtaagatgtgccttgcttgcccttcaccttccaccatgattgtaagtttcctgaggcctccccagccatgtggaactgtgagtcaattaaatctcttttgtttgtaaattacccagtctcaggtactatctttatggcagtgtgaaaatggactaactttgcttgtgtgactttttaatatcaggttttatatttgagatgtccacatgcaatcctgatcaagacatttaaagaatatctcatcaaacctttagagaccaaacattttgttagcaaaaacagataatacaatttttgaaaacatatactgcatcatcaaatccttaccattggatcatatttaagtagccaagcagcattcttttctttcattaacaattaaaatgctaagatttcatgtgacaaagcaaacttcaaatcctgttgaatattttgtgaaatatagtgtatcaagataatcatggagttctggtttgatgaatggcacttccatggttggaatggatagtgcagtcaccttgcagctagtttggatgccattaaaagctcacacaaactatgaaaggcagtatatacttgaagatagagaactgtaccttccaggagactccatgtagcctccaggcaccacccagcttctattagtctggccattaggctggccaccatagtgatgcacaacggatgaataacgtactcactgattattcagtgaaagagcagctagggtgccgggccatgcacagaaagagttgtggcagccccacgccttgactagctggccctgtgggcatttattcagcacagattaatgacaaaggctttgagtcaacaaacctgtggataattaacctgggcagccttcccagagagagccatcctgcctgcgaatgatcaaaggttagtcttaggaccacatgagtaaacaagctatttagataaactctgttatattcctttgtatctgtgccctgcgctctctggctcctgaaaagagaatctggctgccttcagccaaatctttgactgaagctatgcaagccccctggccttccaagaaggtttgtgtctatttcctataatttttccaaccacaccgattgatcccctacagtgatgttttttgggcatctgagaaattaaccccttcagcagcccacaggcccctatccatgggaagtagcctactccacagctggctactgaaatggatttcatatgactgaggatcttcatggccgaggtagagcaatgactgcccatgtccctcgctttgtagtaacctgcaagtacaaaatggcacaccagtaagcccgagtctccatatggcaccctcctagaagcctatatgaagcagtttgagccagaggggacaaactcaacttgggctctgtcccgagcttctgtaactccctgacaggagcgccccccaccccccacccccagcgtttgtagtttatcagtgcactttagctcatgtatgtgcttcagcacaccagttggaaatttctggagaagaaaacataaccaggaaggcttgcggatctgtttcatttggaccttgcagtgttcactttaagagttttgtttgtttagttgacatggacactgatattttaaaatacaaattctgtcaaggcaactattggctgttattgaggaagaggtaggctctgtatccccagttcatcatcacctttgcccctccattttgcctcttcaatactgaggtcatttgtccttacacgtttatcaatacacaattatttttctggtggtagaatcagaaaaaagtcaaatatttcttttaattgtgtctgttaaaatgaaaaatctggtgttagaaacaaattcatattttaagaaaaatagctcagggtgtgggaagagcccctgaagtaaaaattagaaaaaagtagccacaagcaaccatgcaatccgttcaccaggattgaagcatcactgtagaccttgacttcagcatccacgcttgggtatatctgaattacagctccattcaaaagatagttctatctgggattcattttttagactgaatgaaccagtaaacactgggcttgtttctttttttttgaatttaatattgccacaggaaggacaccaagacagaaaaaaaatagtgctctggatggggcttaatctacttaattgtaaatattagaatataggtgagcttattttctttcccaacttaatgcaatgatacacacatatgcggtttttcaattaaaggattattttgttgaaactgaaaaattaatgtaatatttaagtcaaatttctatctgtaagttataatactcataatttataattctattttaatactcataaaacttctaaaattttatctataaagtcctgttcatatatataatatacacgcatcacaaacattcatgcactattttttattttttgagacagagtttcactcttgttgcccaggctggagtgcaatggcgcgatcttgctcaccgcaacctccacctcccaggctcaagtgattctccttgcctcagcctccctagtagctgggattacaggcaagtgccaccacacctggctaattttgtatttttagtagagatggagtttctccatgttggtcaggctggtctccaactcccgaccttaggtgatacgcctgcctaggcctcccaaaatgctaggattacaggtgtaagccaccgcacctggccatattcatgcactatttttatattttacttttaacttactattctatcagccaaagattatccagaaccaactgataaactagaaatgtcaaaatgcggaaaatatagttcctgtcctcataaagctctcgttcaagttggaaaatagacgtatacactttaaaaggtgtggctttcaataacagttatttagggtagggaaacagtgtagagaagagtaagttacactgtgtgtgggatgggtaggaatcacagtacactttcctcaaaggggatccatgaacaccatggagttatttttaaaagttatatggccatgcatacagaaatataactgaactcaacctctagatggggagtcatttcatcatatctacttcaagtgaatggattccattattgtgtatggttactacaagtctcccagaaatcataatatgatttggttttaaaagcataacaagaaccctaaagcttatgtcaaaaataaagtgggttcaagaacaaaatctgaaatgaagagttactaggagatttacttgaactgttactttcttactcagtattcagtccaggtttaagtccttcagcatctgacattctcctggcaactgtaattgaatcaatgatgactcatctgagatgagcaagttggtccagtcagaccaaacaaaagacattctataatcaggggagaagtcttctctatatctctcttatatgagcaagtaagtaagcattattattattgctttgtggtttcgaaactgtgggcaaatatatgtaaaatttaccatcttaaccatttttaagtgtagggttcagtagtgttacatacattctcactgacgtgcaagtgctctccagaactctcttcatcctgcaaaaactgaaattctatacccattaaacaactcaccttctatgtcttatagttctggaaacataaaaaggcatctagttttatttataacatttcctttatttatcaacagcaacgatatgacattacaaagtgacccgtgacatcttttttaatcttgcacacgcactgcagcaaggttaatcctgtatgtgaaaacctctgagtgactatctcaaagtgtatatgtcatataacctgctgagttttctgatattgtaatactagatacaagatgtctgaataactccttacatttataaattcttatttaattttatagctttaatgcggtccatcatttctaataatgatattggctacaagaataatgatcatattatttatcatataatttaccatttgtaaagcaacaaattgcccattaacaatgaaattgtagttacagcatctaaaattattagaaaattatattagcatggaaatatgttcatgatatatcactgagtgaaaaaaatctggctaccaaatatgtagtctgactcattcttatttcaaataataaaaaatatgtgtatgtttgaaaatatgcacattagtatttgtattttatatatattatgtacatcattatatatatatgcatacatatttgtatatacacacagatagcacaggagagagacagagtgggagagagaaagaggagggaggaactatctcttccttttttctcagcttaatttcagctacaggagaaagtacactagaaactaattaacaggaagagtacaaaataatatgttagttataactatcttcaggagatgagaactgggaacatgggtgacttttgcttatttgcattttctaattatttaataattatataattatattatctctctctgtaatttgtgtagtaaaacatcagttttatatccaaatttttagtcatttataataaaaggtatattagcatatgattattttatccttagcccacaaataaaactcacaccacatttcctaacactatgggcattttggaacacagtcaatagtgtcacccaataaaataaatcttgaatggttgattttaatacactaaacattacatgaaaatatatgctatcaaaaagcagacattaatatcttcttaataatttttaaaacatcctaaatttaataccaagaattttgcctacccgagttaacattatacaattacatgtaatatacatattcaaaatggcataatcacatgaaattttaaagtaaaaataactcagagaaacttccagtttaacatttacacagcattttattatcctattagccagtgtaaatgcaaactaggaaagttgatatctttcttttatgtaaaaggaagcatatgggtttaaatacctttttatatagcactatcaaaatcggagtcaagattaaattagggaaatctaagtttcttttactagtttattcttgggaatgattataactaacacgtaatttcccctactttgtgaaattccttttctttattgtatcttagtccatgacacaggatttaagaaacttcattatttcccctcactttaaagtgtaggtacccaaatagctttgatctggtggacagttatgaaggcagcagtggaggagtaaggagataaataagaggacatgaatcaactaaattaataataaccacagttcaaaagttagtgtgaaagttttatcaatatcgaaattgtggaatggtgagcagaatacaactgggacccctgatactgagatctaactctagatgtaccatagttagttgtatgagattggacaagtcaaagtacttgacaatcagtttcttcaacttagaaataaaacagtttaggccaggtttattaaagtattaaaacccctttcagaggcatagttctataactctaaggaacataagactgtggatacctatctactgtcaggtactgctttggcagcagtgaaaatatcagtttcaatataactttaaacaataaatggactaacacttttgaagtatgaagcaaatacaaaccactggaatatttttatcccataaatcgttactttctttcattaagaaaactttaacctcttgatctaaaatgccatattgcatcttttaagttaaatagcattaccactttcttcattattatgaaatttaaattctgtatactactttattatttagtattaatatttaaatttatccacaaatgtgctttctaaggaaacttgttttaagtaatgttttaaaatattcataaaatttgttttctttactttgagatctctgcattctttaagtgatcaacgcaatttataaaaccggaacttttatatgaaagtctatatacttttaatgtccttaatttgaattaaacattcccttataatacaaattaatgtaaacctaatgagtaaatatctatattgacatgacatacttcctaaggaaatatgggaaaatcataccttttaaataggtaaatgtatattcaagagaatattaccaagcttgattctctcccttggatcttaggaagtaaacaacagtactgtattttcacccacctccccgaactcagctttatttgtgctagaagaggtgattttattcaactagttaatttcagtgcaggttgctgtaaacaggaaataatatgttatttatcatagtaagacaaaaaaaatttgaagtgaatgacttgttgggtctatgcaaacacctcatcctacctcagaagcaatcctaagaaattaatacttacttagctttctttttaggaaggccctaatacaaggcatctttctgtttttttgttttgttttgttttgttttgtttttttgagtgttacagcctggactggccagcaagacagaaatttcttcttcctaaaaatgtgtaatgtcaaataaccattatcaaccctatctatgttaatgttcgcacactcatgaatggggaaatgtagggctcatggtaataaatcaataatgacaacaatgaacatttaagtccttattatgtgtcaaatagtttacattaattaactcggttctcacaacaacctaagaagtaataatggttagccactaaatatgataatgtagaagaaaataatggaaagtaaataaataatgtgaaatctataagatacacatccatgatctcacatccccaaaagtagctgtacctttttcagtttttttccttttacttccctggaatttgtaaatatcttttcagctctaaacagctaatacaataaacacttttaatctattttggcaggcactgtttttggtactatgggggacacaggaatgagtaagagaggtcctaaattccatgctgatactacatattgctgataatcagatcaatttcataaagtattacagttctggccatatagaaagggttctagttttatctatgaaatttctcttaattgtctatagcactgatacaatcttacaaagctgcctatgacatcttatcttgcacatgcactgcagcaagaaggctgatgctcagtatgtggaacgtctggagtgatcatctcaaagcctttgtcacataacttgctgagttttctgatattctgatagtagttataagatgcctgagtaactcatgaaatcttatggatttttatctcactttatagatttaatgacctccaccatctctaagaacaagcagctatttctgtagagaaagatcatctttggataacaatacatgattttaggctctaaaagttaaaacgtgtttgtaacgttgatattatgcagaggtcttgacagaacttggcagtctctgaggctacagagaagtgtgaaaaagagcatagagatttcagaaggaggcagattcagtcagacgtactgaatcccgtttgatctcaactcaggcacactccagatggacggtaagttacttggtttatctgagcgccagtatttttatatgtaagatgaagccggtaacacctaccctgaaaagttgttgtaaagatgttaaatacatttgtaaaggtccagtagagattatatattagatgctcaataaataggaactatatattctcatccatcatctcctcattgcacaactgactaatgcatttcagctccgtgagcatacacttggtctgtcttaaaccagatgaccaggtcaagtatgagaccagttactacgaggacatgcagagatcaaataaataaataaataaaggctttgtggacattgtcaacatatttaccttcccatacagctgtctgctgaatataagctataaaacaggactagctaagatgacaataattgcctaaatcacctttatggctttagtcaggaaaataattatagtgataatgaccttgaactcctgtggaatttccataactaatacataagtatatcactactgtgacattgatgtcttttggtatcactgaaataataaagtgagatagaattcagaaagaaaaatttcagaggtggactcattataaagtacctatgattatcacataagcctggaacagataaagtacactcatattaaaacataaggcaaaattcttaaataaaaagccttgatgattagagttctactgagctactgcctcaactgatgaaaattctaactagcacagtacaaatgcaactgctttgagctaaacatcagtttcagaaggaataatatatgcgcacttcccagcgacccttcatttaaaaacctgaatctagattcacaatcatccacaaaaggaataatttctatcattatggtacctagatgatttcctttttattactggaattaaatatacttaaataacatacagagcttaatgaaaaagatcatgaatcactccaccataagaattatcaggacatgataaaatcttatgtatcttaatggtaaaaacaatctgattattaggtctttgtttgaggcagtttatctacagttcaaaaaaatgctttcactgattacattccaaagtatttctttcattgtcagcaggagtgtctggcatttaattaaaatatattcctctaactataaataattgaatggttttaaatctatggctaatattggcaaaccgataaataaccaaataatgtaagaactagaattatcaaaacacttttgcgaacacagttctgcttggagggctccacggaggaagtgcctcactttcaagaaaggaatgacgtttcttctgttttcgttcaattctttcttgtttttccttattttcctaaagagaaaatagaacactataaatttatgtacatatatgattattattttcaaatcaggttgcttgctgaagaacaaaataatccattataggatatttatatatcacttcctagtttaacagatcataaagaaataacaggtagggccaggcatggtggctcatgccagtaatcccagaactttaggagactaaggtgggtggattgtttgagcctgggagttcgagaccagcctgggaaacatggtgaaacatcatctctacaaaacaacacaaaaattagccaggtgtggcggtgcatgcctatagtcccacctacttaggaggctgagatgggaggattgcttgagcctgggaggtggaggttgcagtgagccgagattgcaccactgcactccagcctgggcaacagagtgagaccctgtctcaaaaaaacaaacaaacaaaaaatggaaacaagaaaaaaattagtaaacattgtcaatttgcaagtactaatatcacttaattttttaaactttaaaagtgaaaacattaaaaaagaattgtataaaatagaaaaaaagacctataattataactcaaatatagtaactgttataagttggtggtgacttcgtgagaacaaattctcagaagtaagtttactgggtgcaaagtttcaatatgtcatgacagtatgagatacttcaaattttttacaaatagttaaaaattctgcctcatgtttctttattattgaacttgagcacattttcaaacatttctttagccttttgtaaattttctgctcaattatttggcccatttaaatgtatggtatttgcctttaatttttagtaatttgtgtactttcctataataaatattaatgatatctttgcatcaaacattttgcctacctttgtgagtcatttctgattgttacacaatgtatacaatgtagatggaaacatcacactgtattccataaatatgtgcactttttatgtgtcatttgcaaataaaaataattttttaaaatcccaacacacagatatggtccctgtcccccagggaactttcaaaatggacagaaacaaagaaaataaacaacagataattccaaattgtgtgaatttctctgaaacatgttttaaaactatgagaaggaataaaaaagagtatttactttcaacaaaaaatggactcagggaaagtccctttgaagtgtgacatgatggataagagaagccactcgtgataaatatcggggaagagctttgcttgcaaacagtagtggtgagggctctgagagtgggaaaaaaaatgtgtgctgtgggaggaaacaaaaatatccattgtgactaaggcttggcagaaggcaggagacaagaaatggaagaggggcaccaggtgtccctttatgtctctgctaacactataaggtttggtggtttcttcatcttggtatttttctcatattcctcaaggagcaggaaaacccttagtgaaacctgcctctgcaggttgatggcttgggaggaaaggcattatggaaaatgattaggtatgtatgcatcttttcatcagtatatatataaatgccacaagaataatatggcaatacaggacaagctttccattcacatgtaacaaacaaagtgaagtgggaggtttgtttgttttttgtcaatgttaacacccatatcctcattccatgtcataagaatgcttgcatgtttgtttgcttgctatttctaataaggcaaagaggaaacttcctttcagaattttaattgagaaaagcaaagctgtaattagatcatcttcaatcattttaatattttagagacagaccatctagctaggcggaagaaaagcagtgaccagactgtgtccacagaaattgactgaataaatctctttttgtaatttcacttaacatgagggggcagtaacttgaaatatgcttcatcttactagcagggagctgtaaagccagggtagcaaatagacaattatattaactgtaatatcagttcaaaagaatcaatagtcaccttgatagtaattaaaagaaccttgttaaaaagtccttcagacatttatttgtggaaaactgagctttttgcttattttcttactaaaggtaatgatgaattaatctggtaattggcaagaaaaatattttagtcttacctgatctttggctattaactttcccctaaagcaattacccaccaaatgcttactgttcaaactagtttgtatataaaaagcttgagatgttgttttccatgaaaactgaagtcattagactcctatacaggggcaatttttctattctatctgcaaacaaatttcaataagaatttggtaagaaggagaaccgatctgtaacatgtatgtttatgtgtttataggtgtactatatttgcagacattttactagatatcaaacatgttattttgtctttggtctttgaggaattcttgttcttcagaggactgataagaatgacaatgtaattaagtgctataattaaaaacagtatacctaaatgtgacttattaaagaaattctattccattttcatgaagatatggaattaaaatggaaaactcaaatgtttacatttaatttccctaattgatactagcagtcagtgtacatcttcttaatataagtggactttaaatttttttttagaacatagcattatttaacagattaacttaaggaaatcatcatgaaacactacctttttcattcaaaattgaaccaattttgattaccttattttattactatttctctgcatcgaattagcatatagcagtactaaactcaacacacagagtaaatcctgttggcttttgttaagattgcattaaatgacttcagggagagctgacatccttataacatcattataaggttaagtgtgtttctgtgcatgggcaattctgatccattttctcaagtcttcatttgtgttgttcaggagagttctacaattttctttatgttggtctggcatgtttcttaagtttattattgttttatctttttatcctatctttaaatcgctcattttggtcccatgtacctttctaactactgctgattcttaagtttatggaaaaaataaataaacaagactggtcagaaagactgtgaaagaagaactataaagggagatgaatccaagcagatatttagacatatcaagcctaataatggaagtgtggcactggaatcacgagactgaccaatggaacagaaagttaagaaacagacccgaaaacatgagaaggtatcatataacagaagtagcacctcaaatcaatgggtaaaaatgggctactttataaaggatacatttggaaaaactaaagttgaaatcatatttcccaccatgtatcagggcaaattccaagcagaacaaatgttaaaacattaagatattaaagtcacaaagttgttagaagaaaaataagataattctgtttaatctcaaattgtgtaggtcttttcaactatgcttgaaaatcaaaagccaaaaaaaaaaaacagaaatctgacacctaaaatttaaattcttcatggcatgagatactataaggaaagccgggaaaccaacaatatagtgggggtaaatatttgcaacccatataaaaaatgataggctaatttccccagtacaaaacaaaagattctagaaaccagtaaggaaaaaaaaccaacaatctaatagaaaagtgtgcaaagtctatgaaatgacaatttacagagaaaataatagataaatggcctgtatacaaatgaaaagatattcaagctcaattctaaccagagaaatgcaaatcaaaaacaacctggatgatttagttgattggtatgagttgttttaaagtttgataggaaacctgactggatagacttctagtgcaaaaatactataattttggttgctgaatcatatgaatatgttaactattcatatgaatgtgttacctacttatgtaaagtatttattcatagtaatgtattacttatataaacatggacaaaatgcatatttatattgatattctaaaatggaaaataatattttgcttgacatcaacaaaaagtaacttttataaagataagtaaagtgaaatcaaatatatacacatatctggttcagctagctattgctcctcctaaacctcaaacctgctctctttcattaaaaattcctaaataagagattctccttgaggtcatcagaaacatcaaaagagaataaaagatggaataattttctcactattaagttcagtgttactttttgtcatgaccaagttccaccacgtagtaccctcaatagtaaacttgtcttctttctatgttagatgtgagaatcacagcaaaggaagaatgggcatgaatagtaaatggtaaatgtggggatgcaggtaaggaagaagattataacaagttttcagcctgggtgtttgagggaatagtagaaacattaatagaaatgactaagtcaaagaaaatatgctatatgcaggaggagagcttgaattcaacaaagcagattccaggtagaaatgatcagtaggtctggagcaaatagaattagaattagggacagaaaagacacaaaaggtacatgaaaaagacgaaagtgcattgacaaataatacctaccagccatttttcatattcattaatagcttgtttatctttatcttttttctcagctcttttcagttcttcctttcttttctcatttattttttctttttccttttgcttgaaaaaagcttcctttttttcattcctatagagcatagtataaaacactggagagttaaaggaaaatacataataaagattccctagtacatctttgacagtaatgaaattgaaatgcattactaaatttcaagtaaataaattttataaaatcctgaagtgttactataatttaaaatatatcaaaatatttatgattttggattaccatttctcaacagcagttaaattatctttctttttctcggcaacagtttcctcctctttctgtttctttgctctttcatattctctctcctttctatttttctctttaagatattccatctttttctctttccatttttcaaaagcctgaaaaagttcagaataattttcttactgtgaatatttgaaaataaataaaaatatggttaatcattaatttggatttcaaatgttttaaaataattaagatgtgcaaagttctgaatacttgtagtgcttctccttttcttgcagcattttcttcttcagttttcttcttgtttttttcttcaagcctctttttggcagctattttctttgcttccttttctttcatagccttccaggcctcaaatgatgctaatgcttcttctcttttagcagcttttttctacagtggaaaaaataatagagtgatatacatatatatgtatatatacatagacacaaatatggctagatataaatatacacatatacatttatctttagtcctctgatattcattatacttagaaattaactttcaaagtaggtaatttatttagaatggcttagataatttacaaagaatgttatctgaattattcattggttttaaaacgtccttttctaaaaacatttatcacatattgacctattaatgagaaagatgtcaactattatttttgaaagtgtactaaacaaattatatcaaaataaactgtaataggctaagtggtatagtaaaattttcataataaaatatttgaaaaaaaaatcagtaaagttatgggcttataaagtaagttagagtaaggcaaattggccaagccatgcagtaagatgcagatttttggtttaaatcttaattttgaatagtatcaaaacataaagttcttactgcacaaatgtattccaaatgttgaaagtatgtgctcgactgaaaaataggttggagactgtatagcaagttatgttattattttacttccttcaatctaatcccataatattctatgtttgctttattgttcaatattaaatgacataaaaccttaatattggggtaacataatttagaggtcaaagtactatctacctcacagagctacgaaaatcaaatgagaaggggtatggcactgaccacagcagcatactgctatgaacgtggttaacagatagacaggcacgccccctggagggctgctcccttcactactgacgcattatcgtgcagttcaccttggaaaatatttttcttctaaatctatttttagtattgaacagcacactggagtttttgtccagaagtttgactttagaagataagaaataactgagcgtattacaagcaggagttagaggaagagactcagtacagaagagacaggaacaaaagttcacctccattcaatgggaaaggatacagatcaagagttcaggtaggggttggacttgaagatacttataaaattcaagagagaaaagaggaaaattgaaggctaactagtgtctaatgatcctttatcttgtcgtgcctttttttttttttttgagacagagtctctgtcacctaggctggagtacagtggcacgatctcagctaactgcaacctccgcctcccgggttcaagtgatcctgccacctcagcctcctgagtagctgggattacaggtgcccaccaccatccctggctaatttttgtatttttagtagagatggggtttcaccacattgcccaggctggtgtcgaactccagacctcaaggaatcccatctgccttggcctcccaaagtgctgggattacaggcatgagccacagtacctggccttcttggttaagttctaaatgaaatcaacttttaaaagtgaattaggtgctcataaacaataataacttcataatcagcaggaacaaagctatcctatacatatacaaaattaaaatctgttttcatgtaaaacagttatatcaaactaaaatgtataaagtaaaacagaagtaaaaccggaaatcatttctttaatatacaagttattttgccatttaaaaagctgatttagaaaagttatatattcagggatattttactgaaataaaaatccaaaacatttttacttctatatgtcagaatacctgttcattttggatccttaagttttcactttcaattctttttattctgtgcatttcatgtaaatacacatttttcttttctaaccactcctataagaacaagaaaaaggtcatataatatttaaaatttcttaagtgaattagaattctttatattaacattttctctgaaattcacatgtacaattttctaaagtatactattctactctaaaaaagacaaaaaaagacttttagaattgtgaataaattaatacaatctttttcctatgtacgcctaacaacatctcaggaaagaaaaaatttaataactttttgttcataataactccttttgttcatataaacttcaagaagaaaaaaatgaaaacatatatagactttacaatgttttggcttgtgctgtatttctataaattgcaatggcatattctttctttaaaaacaactatggtcagttatgcaaagtgtggaagcaaataatttagtaaaatatgattactcatgtattaaaaggaaactctttctcaataaatttaagtattaaaccatcattttctatcaggattactttattctttataaacagtgtaggcttatgaaagtgatcattcttcttctcttaaaaatattttccttttttacctgataaacagctgcccttatgttatctgctctatcaggttctatgctctgtttctgtgaaggtttttggtccaagacttttaaagtccctaaatagtgagaagaggtagttgtcgatggagttctccttttagaactagatttcttcaaaaactcagaggtcattaatctgaaaagatccaaatgaatcaagacaaaatattacaattgcatttggtagaagagagatctgttagaatatgcacgtataatatttgaaaactggccaggcatgatggctcacacctgtaatcccagcactttggaaggccaaagtgggtggatgacttgagctcatcctgttgggctgttgaccagcctgggcaacatggtgaaaccctgtctctaccaaaaatacaaaaaattagctggcgtggtggcacatgcctgtagtcatagctaccctggaggctgaggtgggaggatagcttgagcccaggaggcagaggttgcagtgagcagagatcatgccactgaactccagcctgagcaacagagtgagactccatctcaaaaaaaaaattggaaactacattataatttaacaaattataattactttgaaaatgatgtaggtaaaatgtacagtcttagtatacaaagaatattaaattatgtagaaggggacataacttaaatatgtccccttcaacataatttaaattttataactttaagttatatagctttaaaatgattgctctttttaaatatttgtaattagaaacttaagaaatatggaccacttctcaagttacatggaaaaaacaatacagtaggttataatcactcttttaatattttctttcatcattttgttacatgaagcattccaaatataaaattagaaagaatagtactatctatatcagggattggtgggaaaatttggccagccattggttttgatatacaaagtttattgcaccatagctgtaatcattcatgttaagttttgcctgtggctgctttcctgttaaaatagcagaaatgagtagttccaatacagactgtatcgcctacaaagcctaaaatatgcactaactggccatttacagaaaaagcttgctagctctgttttatttgattaatgataatttgactaacgataattttaaagattcagaaggtttttgattagcacttatgagttaggcattcattatcattggtgtgaatgaagctatacagataatcattttaataaacctacttagttcatagattctgaaggctttcagtacaatttctcatgttagacaatgatacttgataatgaataagtatcattgctagacttcagctttattaccattttatattgcttgtctcaggaaaagtaggagaaagaagctctattccagaagcagtctggagcacaaagaatccctaatcactgacattaagaaagaagaaaaatattcctaggacgatcctggagagcaaaggtattgcataaacattccaggcactaaaacaatcagtaatagacttactttttataaattactttatttcaaataatatcatcaaccaaggggttttatcatgaagttaactactttcattttatgaaatggaaataaaaagaaaatacagtaacaccaaatgaaatttactttatgaaagttaaattaaaactagctttgctagaatgcaagcccataaatgacaaatattggtaactttattacctggcagatgcactggatgctctattatttgttgactttttattctttatatttctatcttcaattgttttctattaaacagaaaatgccaaagatgatttattcatgacaactatcctttttaggcttagaagccaaactgccagtaaatcactattctttaagcatctactatgtgtcaaacacagtagaaattgggagcaaatcagtgaataaaatgcccttaagaatattaaattctagagacggatgaccaaaaataaatatataagcaaacatggctcatgaaggacataaaatagtgtgcagtgacagagaatgactagagtggggctgaggagctgctttaaagaagttggtcagggaaggctgtcctgaggggctgacatcagagctaagagtgcaaagggcccaccgaaaggtctatgaaagaaagaaacagcaagtgggtaaaagcctgagaagggacggaacctgttatctctgaaaaacagaaagaggtgaatggagctgaagcatagtgaatggcagggaaagcggaggaagacgtggtcagggaagaaccaggtgagatcactaggcagcgatgaggagtctggatggaattcttgtgatgagaaaccaacaaaaagactttaatggagaatgattatatttctgtttagaaaaggtcattcagtagagagtaagaatgaggccaagggtccagtcaaaagaaacaagttacaaccttacttgttacatatgaaatgcctgttctaatttagaattgcctctattagacattctacaatcctgtctataaactccggaatatcctttcttcttttaaggaacaacttttctactttacacagactgatgggtgctagtggtaaagtgagagcacagacataataaacacatccctaacttagcagtagtgtttttttcctaaagaaattagctaaggatgatatacctggaacatggcttaatgaacctccttcatcaattttaagaaaagcttgtattttatgttataaaagtattgctcaaacacaaattttcagctagccctgttttcttccgctgataataaacacacagagctgctagctaattgcagctacaagagataatgacaaattcaggagaaacaaagactgaaaatgctacaccataaatttttaaagtatagcactcaggcacaatttaatgtagggacaagtaatcctacatattacatatctgtttcttaaggttataataataatgttcccctcaacaacaacaacaaaaaacaaataaccccactaaaaagagggcaaaaaacatgaatagactttttgaaaagaagacatacaagtggccaagaaacatgaaaaaaaatgttcaccatcactaatcatcagagaaacacaaattaaaaccacagtgagatatattatactagtcagaatatttagctattattaaaaagttaaaaaagtaacagatgttggtgagaacacagagaaaagggaatgcttgtatactcttggtaagaatgtaaattagtacaatctttatggaaaatagtttggggatttcttaaggaactaaatatagaactaccactcaatccagcaaccccactgtgagtatctgccaaaaggaaaataaatcattatataaaaaagatacctgcactcatgtttatcacaccactagtcacaatagcaaagatatggaatcaacctaagtgtacatcaacatatgattgtataaagaaaatgtgtatacacacacacacacacacacacacacacacacacacaggaatactattcagccacacagaaaagaaataatatcttttacaacatggatggaactggaggctattaccttaagtgaaataaatcagaaacagaaagtcaaatggtacatgttctcacttacaagtcagagctaaataatgtgtacacatgtatatagggtatggaataatagataatggagactaggaaaggtgagagggaggtgcgggatgagaaattacttaatgggtacaatgtacattttagtttatactaaaagtctgactttaccactacacaatatatccatgtaacaaaaaagcacttgtaaccattaaatttacatgaattgaaaaaagaaaaaacaaagcaacttcatcacctctggaggttgccagggcaccagttcattattttgaaaattaggaaataaaggcaaaggatcaaatacgaataataatactaatgttcctgatgataaccatctattttaaagaagcacagatgttgataaactgttgataaacatttctttaagatttttgttaaaattgttaacacgttttaaaacaatatccaaaaacataactctaatttaaaatctcagaaattattccagacagttatatttttaaaatatgaagacctatggaaatatatacactatgagtatgcatttctgagacatttaaaagtatattatgatcacacacctctgataatttttaaacactgggtttcattatattcactacaaactttccttaaagttaaattttattggattaagtaagaaccatgtgacaatacaatatcactatcaaaagataaattttccactggtaattcagaagtatataacacagaagataaaatttcttaaagttctatttcaagttttaagctgtagtatgaaaagtatgaatttttacaaatacctttgaagatgctgttgcactggtagatattaagatactctgagatttagatagtagtggatcaactgttctgtcatcatccataatcagttccgcttttgccttttcttcttcaaggtcatcagcagtcacttgactttccttggatttctcaactgcagtagtcacatggtctgctgaaaatgaattctctttattttcatctgatttcaaggaattatggttttcagtgatttcttcatttggatctattttgagacagagtaatagcattaaaacccccttctgaattaataaggtaaatacttgattcatttgctttcttttaaatgaggactatctataaactcttttttcttgcaaaatatgaagaaaagttatcatattaaacttgcataaactcttttcgaaagtgatttacaaaaaaaaatagtctaggcttaactaatgaagcacttaacaaatctagtacttagaaaaatagcatattaataaacagaatggaataactaccctaaaacaacgacatgtcaaaagagcttgttgatatacaaaccaagtaagtgagatgacaatatttgtttaactctaaagcctgagtttcttagctggaacaacacgctgcataagaaggtgtcacacctctctaggctactacagttactagtagtacaattgttgaattgtatagctgcagaaagaaccaagaattaatgcaattttacacagtctctagtgagtttcatctcaccaagatgtagtacttcctctgataccataaggggcaataaagacaagcctattgcttatcctctcagtgctccaagaaacaggctcaagctctggcataagaagattcagttttgcatttatagaattgcttctactattctgattttaccacattttggaatgggatcaccaactttcagttctaccaacgtccaccttgcagctaaacctgaatctttactgtgaaaagtcttaattctgttggtttcattatgaccatttttttggaatttgttttgaggtaacatgggcttaaaatcactcaattcactattggattctttggagctgttaatctgttcagtgaaaagaacaagaactttggaactcaagatttaactatggttccatcactgaccttgggtatgtttccctaagtcactgcacttcagcttttctcatctgtaaaatgacaaaaatgatactacatagtaagcactaaaatgttcattacacatctcagacctagaaatagctatgtcttttaggtttcattaagctacgtatcactaagaaaagaaattatgttaacaattcacatatcacaccaagtgcttactatggtattgctgtaaatgctttacatgtttaattcttacaacaccctataaggcaaattactcttattttacccattttaaagatcaacatacagggtcagaaaggttagttactttgcttatgtaattgtgcctgtattggaatctagcttagtctcactttaaaattccacctagctattatgttgtcctgcagaatatcacagcaacacatacataacagtagtttaccttaagtgctcactccacttgggctattaactaggctaatggctaaaatgcactatatcacttaattttcacaataaccttatgagacaaataatataacttagggaaattgaggcactgagagattaagttctgcatccaaaatcacagttagttaactacatagtcaggattaaaactcaaacacataaaaacatatatttctcttataactatacaaagtattatttctcttacaaacaggagtctaagtagtacagagttcacatataagatataattattagatataaccaccttttccagatgcgtttccctcagatcctggtgaaaaagaatctccaagaatttgtttaagtgatgatgatgctagacttgttaagcatgaatcctgttttcgcaaaaaaaaatacatttgccacataagtttaataattaacatttatgggaacaatagcattattaaaactacaaattgaaatagtgcataactctgaaatctgcattatttaggcatttgttgctgaaacgcaaagtgtgacaagccaatggaggtaagcatgctttactttcaagccttgatgtcttggtcattaaaaggggtcactgaaagagttattcaagttctttaactaccaccacctctctatttattttttaccaattttcaaaactcctattacttaataatcacatttcttataaatatttaaggccaagatttgattttgatagctcttcctacaattatcctttgaaggaaagcataaagaagacaggtaaaatactttagttccaagcaaatattactagttatccaaatgaaagcatttaataaaatcaagtaagccgctacttccaaatattttagataggaaaagcacatagattgcatgcacttgagttttcctcaaaattctgaaaattctatctgatatgaaataattatatttgtctatctaaggtaaacatttcttcatagaatcatctagcctaaaggtaatgatattacaatgtaggaagttcaactttgttgtacaaatactttaattttctttctccgcagtattttatgggtgcaaaggaaattatatgtcaaaagcaatggagagaaaacatttgagaaaatggaagaagtgctgagacactggagtctaccctgaaagataaagcttcacctgaggagatctgcaaattagtagctttttgccagaaggcattctccagtctatgcagctcaagtaatagaaggctacagccttggtggaatgacttgagggaacaggggactgagtctaggaccatcagatcagccaataagtatgtggaaaatagcagaggacagtgaccacaaaatctgcatatgaaattcaccaaaaacctttaccacctctatttgtggcataagggagacctcagaggatcctgtaaaagcatagaagctagaaactgaaaagaattaagcagaaatttcagctgatatccactgcaggagaaacaggattgggaatttgtgtccagccatgatatccacttgctagaaaatatgtttgaagggacataaaagaatacagaatctctacaaaatatcattcagaacacccggtattcaatcaaaagtcactaaagaaacagaaaatggtgacacttatttaaaaaacaaaataaaaaaacagagaatggtcaataggaaccaacccagagatgactcacgttttagagttagcagacaaggactttaaaatagctaatataaatatgttcaagcactttggggaaaatatatgcatgatggctgaaaagatgggggattttatattaaaaaacagaaaaaataccaatagaaaatctgaagttgaacaccacaataagtgaaataaaaaattcacctggaaaacacacatactttgcaactgcaaatggaactctcacgacatacccttttgctgggccattaaaacaaaacaaaataatttaatacaatttgaaatcataaaagatacattctccggaccacaatctgtaaacgtgaagactaagtaatacaagttattcaatcttaaaaacaaagaggaaaaaagatttaagaaatataaacagaatctcagagatcagtgagatatagcacaaatttcaatgcatgtgtaactacagtaccaaaaggagaggatgaaaaatagggtgggaaataacaatcttcccatttcacagacagtatcagcttataggtttggaaagctcaacaaacgtcaagcagaataaacataaagaaagctagacccaggcaccatgcagtcaaattgctgtaatcaaaagataaaaaccacaatcttgagtaaaattcctgacagcattcagacaaaatcaacacattatatagagaggacaatgaaatgaatgattacaagagaggccaataaaaatggaaacctataaagagctggaggtagaagaaggcaactgttagacaagaagaatacaatcacatcaaccaccatttgaaaacaaagatgagacaaatacttttagaaaagcaaagactgagaaaaatccatcactagtaaacctgtattacaagaaatgtaaaataagtttgtaagactgacaggacacaaaatggtaatctgaatctacaggaagaaatgaagatccctagaaattgtatatgtatttatagatatgtaatatctataaatagattatatagatgttatatatctatataatatataagaatagaatatatattacctatatatagatattgtctacaaatatatattatctatatttagcaatagaatgttatctataatatatacaatatataatacagtagatatataatatatatttattctagccttctttaattttttaaaagtctaatacaaaaaactgaaagggctctttaagaaaaagttataactctattgtggggattataggatatgtagatataatatatgacaatagcacaatggatgagggagtatatggaactatattattccaaggtttctagatcaaatgtgaaacaatacaatatcaattctaaatagattgtgataattttcagatatattctgtaatccactgatcaactctgagaaatacaatgcaaacaaatatagataaaaggtcaataataataaaaaactaaaagattcatgattatctcctcaaaaaaaggcaagaaaggagtaacagagaaacaacaataaaaacaataattttaaaaaacagataaatagaaaataaagagcaacaaattgctcctaaatccaatcatagcagtatttacattaaatggacaaaacattcataaatggactaaacactacattaaaaggcatagattgtcagacttaataaaaaagtgacaccaaactcttattgtaagagattcacttacatgaaaagacagaattagtttgaaagaaaaaagatagaaagcatataccatggaaacacttgtcataagaaagctgaagtattacacaaaacaatctataagataaggaaaggaatattaccagaggtagagacgtttcataatgctcaaaacataataataataaatgtgtatgtgcctgataacaaagttataaaatactgacagaactaaagagaagtataaacaaacccacaaacataactggatattttaatacccctaagttggtaacgggtaaacaaattggatgaaaaatcagtaaggataaagaagatctgaatgatattaccaaccatgttgaccaaacttaaattatacaacattatattcaacacctggagaacacatctactttgcagatgcaaatgagactttcacaagatacactaaagctgggccatttagaaataataataataatttttaaaaatttgaaatcatgtaagatacattctctagactacaacaaaattaacttataattaacatcaaaagtatatctagagaaaaaacaagtatttgaaaataaaataaatcaccataaaataaccaactggtcaaaaaagagatcacaatgatcactatatattatatgtatcgaaaaatcactatgtaccccatgtacaattattatttttcaactaaaaaaataaatttttaaaacaggagatcacaagggaagttaaaatatatatttaaagaaatgataataaaaataaaaggcatcaaaaaatcggggccactaaagcagtacaaagaagaaagtttacacctttcaacaggtttagcagaaatcacgaaaatcttaaaaatgaatgagaaaattttcaaatctaaagataagcaaattaaaccaaaagaaagtaaaagaggccaggcgccgtggctcacgcctgtaatcccaacaccttgggaggccgaggtgggtggatcacgatgtcaggagatcgagaccatcctggctaacgcggtgaaaccccgtctctactaaaaatacaaaaattagccaggcatggtggtgggtgcctgtagtcccagctactcgggaggctgaagcaggagaatggagtgaacctgggaggcagagcttgcagtgagctgggattgcaccactgcactccagcctgggcgatagaacgagactctgtctcaaaaaaaaaaaaagaaagtaaaagaaataatactgaataatactgaaataatactgaaaatcaattaaacaaacaatagagaaaattattaggttggtgcaaaatgattgcggtttttgtcattgaaagtaatggccaaaactgcaattacttttgcaccaacatatgacaaagccgaagtggttcttaaaaacgtttaataaaactaagcaatgcctatcaagatttagcacgaaagacacaaaacacaaattatatatgttagaaataaaaatgaaatgtcatgataatcctagtcatcaaaagaatgagggactatcgtgaacaactctgtttataaactcaacatatcagatgaaatggacaaacttcttgatagacacaattaccaaactggcaaaacagaaaatgtgagtactgaaatacctatttaaaaaatcaaatgtaatgccaaagatgtctccacacagaaaattccaggcccagataattgtactggtgaatcctctcatttaagaaaataatgataccaaacttttataaaatgaagaaaagacactccccaactcatttgatacccaagcctgatggtaacattataagaaaaaaattacagaccaatagacttcataaatatagatgcaaaccttaacacaattttaacaaatcacatcccacaataaaatatcacaccatgactaaccagagtttatcccgggaatgctaggtttaacatacgaacattaatgccccaaaattcatgttcatccagaacctcaaaatacgactttcttaggaaataaggtgtttacagctttaaatagataagatgaggacacactcaattagggtgggccctaaatccaatgcctggtgtctttttttaagagaaagaagagacacagacatgcagagaaaacacagggaagaaggccacatgggatgaaggcagagaagggaatgatgcagctacaagccagctacaagccaaggaatgccatggactgctggcaaccactagaaagaagctggaagaggcaaggaaggattcttccgtgatgccttcagaggaaaatggccctgcaaacaccttgatcttggacttctgacctccagaactaagagaatacatttctgttgttttaagttaaccagtttgtggcaatttgttacagcagctacaagaaactagcacaatattcaatggatcagataattttcttaaatataaagtatttgcttgggtttcttcttctggttttcagaacaaattaagaaacagcatggtggtgtcagttaggcgtatatcaaattgtcagctttactggtaaagctcaactgcagaacaagatttgaattggtagcctattgtgcttcctaatacttccagtctgaattagggggattcccccatttagtcattgcacaaaagagctcctctcagcaccttctgcctcacctcccagagagcagatccttaagcaccaacactgcagacaagcgatgagaaaaagaaagaagcttggccaggtggcatgcagttccctaatctgcccaagcagattatggggaagaaatgttcttcctgtacttttcccttctgaaatgttcagaagggacagtttgcttctcatagtgaaatacaaagagaaaaacgaagtgttctcccttaataacaatgcatagtaaattccctgatggaaacctgaaaggccacatttaatgctattggaacataacccaaagaacacagaagagtgccatgaacattcaacacacatttgttgagtgaataaaatcaaataaataaaatgacactgactatattgttcttagccataaattacataattcaaagatacataaatttaaaaaattattaaagataaacactattatatagattcagaaaagcaacactttttgacattttactttctctaaaactggataaactctacaatcactggtgtgttatagtttaattggatgcatttccttcttccttagtggtatgtaaaataatgctacgtcttacaattgatgcagttttagactcggtggaatacagtgtatttttaaaaattatttccttatcagttgcagaagaaagtatgtaaaacacacacacacgcacacaaattcattctctccttctctttttcataatcagataaaaaagcataaattcaagaacacaattcaacagtttagtggtagtgctaacctcaggatcaaggttttcagagaatgcttttttctcagcttctaattgtatgccattcggcgttggaagggaagaaggtgcagaatgtaactccaattcttcactgagggcagtttctttatcttctagtccatccttctcctccatgtgacttttctttttcaacatactccttggccgaggtgatggtttaaagtgatcatctgtgtcaaggctgttgttttctgctgaaaaataaaatgcttaaagtgtgtgtataaaaaaatgaccatggctttatctatctctctgggtgctaccatacttccctcctgtgcctatgcccctttgttctctgtcctgaagagtccagatgaagcccacaactcttctctatacagagctctagtaaggcacaaataaatgatggttaataatcaggccggacgcggtggctcacgcctgtgatcccgacatgttgggagcggtgactcacgcctgtaatcccagcacgttgggaggccgaggtgggcagatcatgaggtcaggagttcgagaccagcctggctaacacggtgaaaccctgtctctactaaaaatacaaaaaaattagccgggcttagtagcgcgtgcctgtaatcccagctactcaggagactgaggcaggaggattgcttgaacccaggagtctgaggttgcagtgagccgagatcgagatcacaccactgcactccagcctgggtaataagagcaaaaatccatctaaaaaaaaaaaaaaaaccaaacaacaacaacaacaaaaaaaaaacaaagtaaagaaacagttgtcatcctgaaagtaaccagtcacaagaagttaactcttcaacattgtgaactcttataatattaaaaaaaaaatgttaaaaataaaaaaacaaaacaaaatcttgccccagtttctaccactataaaatgaggaggctcatccatcaagcctttgagtaccaagccctgtacacgttactaaacctcataatcaacaaagcggcaatggacctgtccaggtactttacaggttgatttttctaaacaaaattacaagactagattactaagattataagtgctattataaggacaaagatgatgatgttggcactcaagggataggagtgctaactctcattagaggaaggaatcttttatgagttaattgttctgagtccataaaacttctttagcatttattaaaatttcactctttccattacttctaagtttaaatcaagaatcaaatgctgatttgcatccagtattcgaaacaatgggaagactttccatgtatatattttttgcctgcattttacctgctatacatatttatgtttctattgttctacaaatgcatttttctcaacttcaaaattggtctaattaacatcttcctcccatttacctaaaaatgggcttatggattctgccagaagattccacaaccataccaaattggtattattataagtagctgacaattttagctacatcctaaactccagccaaatgttcaaccccaaatccaagggctctagattcctccctctattatcccctaaatccagagtatcaatatatcctatcaattctaattgccaaatatctcatttattccactttctacatccctgctgtcgggtccttatccactctttcctagatcactgcttccatgatatttacaaaatccaaatcagatcacatcactcctttctacaaaattattcaatggctccccatgatccaatcctacagaataaaagcttaactgcctttaaacaacataaaacggattttatggttttgtccttcactgccttatctacagccattttgtcatctgtgtttctgaaatgctgggctaacagttgtcatgcacacataccacaatccctccaatccctcctgctaccatacctttacctaagctgatccccctgcctagaatatccacttcctgcttctcctcctgacaaatgcttgcatgtcttttgagcctcagtttaagcagaatattatataatgcctgaaagaaggtgttgagtcaattttttttattattgtggtaagaacaaacatgagatctaccttcttaatacattcagtgcaaaagacagtactgttaactataggcacaatgtacagcagatctctagaacttacgcatcccgcatgactgatactttatacctgctgagcatgtttataaacaaacgctaaataataaaatgaataatcagaacatttatagagtgctaaatttatgccagtactattctaagcacttcaaatatgtgaactcatttaattgcctcaaactcctagaggcaggcaactattatcccgtttttaaagatgaataaaatgagaacaaagaggtctcatgcccaaagtcacaaactctagcaggctgcagatctcagattaaaggagaagcatcctgactccaaagttcatgatttcagtcatgttagtattaaaataaaaacatatcctgtgaaaaatactttcactttatagagcaactgtcacttcagtagtgactataaagtctggttattatactttttacaaaagacaagcaaggacagagaaaaccttcaagctctaatagtttcataaagcattacttgctactcagcaatatctcaccacattaaaaacattgagttccaaacctgtacagaaaaaaaaaaagtcaaagaatttagaggataaactcatgaaccatattccctctttcaaagataaatcattcatatattaatttattcatttaaatacttattatatatgccagatattatcttaggaacactagcctcaatttttacttttcaacctgaagaacctgagaatgacaactttaatatattttctacaaaaattccacttccagaagtactgtcaagttcccaaaaagaaaaaaaaatgcctatactttaagaaaagcgctttttttggtaatcaatgtatacaattacctatttaggtaattatttttatattacacgtactgaatataacattgcatatataagtagagcatttaggatcctgatgccaccttgtggttaaaatacagtattttcttattcattgtaacccaccacaggttttttttttttttaaggtatgaaataggtggattattgctttcctgattatctaccataaacttctaattatatacatccacctgtctcagacaaatttttagttgctatatatgctcgcattttcttaataacgaagttcaattatgttcctcttctctccagcattgatttcactcactatacttagaaggtacattttaacaagttaattgtttcattatgcatctgtttgcatttttgtagttttttatagtttatgagatgcacttcaataaactctcacaattttgcaggaatagaaagagggttatttttagcttcctcatcatgaggatactgaagcttaacttatttgctgaagtcatatataatatacagaggcctttcccccagtgtcctggatattattctagtgttctttgctctgcttacatcctttgctcatttcaaagttaatgagattgtggggtcaggaagaaaggagcagttccccaatacatgcctgaaataaagttttgtctgacgttaccactggtatctaatatgcaaagtatgaaatatttaccagcactgtatttactgatgatatgcaaggagatttttatgaaggttaacatcaactaataattcctttataaaatacaaagaatgaaaaacaaaaaatccttaaccttgcatatacaagttcatgaatggtggcccagggtatgtgacaggacttggtctccgtttcattctatctttgttcctttatgcttaaaattcagtaaaattgtgggcagaactaactgtaatcccagatcacaccaggaactttcctttggaaaactgaatcttagtagattttcataggcaatacagagatcaaatggagattctcttaaggagtgcctggatgcttcaacaaacaacagcagcaataacataactcatccttcaaatatacaaatgtcaagaaaattttctggcacaatgttggtatggcaaagactgttagaaggattagtctcaatattgctgtaactctaatctttggagtgtgagagggattagacagcattccattccagttccacacctacaaacaaaactgaagctcacaggtctaggtgtctggagatccacagctatggatgctatggatgactaaaggtgctttggctttgtgctttggctttctatcaggcaacagcctagatgcaagacaaaatacaacaggtctgtaaaattgaagttagacaaaatacaacaggtctgtaaaattgaagttagacaaaatacaacaggtctgtaaaatggaagttaagtctgtctttttttcttaaatatatactagctaccatataaaaattttgggactgattatcttaaaataaacttccaagaaatgcaattacagtaatcctaacaaattacctgaagatgtgcttttaattgaaagaattctgggtttaggtttcatttttattttgtctttttcaaattcctcatccttattttgagattcagagaaagattttacaacaatgtcttcacacccatcaggtgccatttcctcttcatttttgatggcacacactggctcatctttggttatgttaccgtttgatttattggttttcaaaaacaatagttttgaaggattcttttcttcatcatctgatatatgaaagtcattcatttttttattaactgaattttcatctgctgaagtgtcagaaaaatcacctaaagaaactgaaaaatggaaaagaaaaatgttttcaacagtatttttaaaaattgtcaaggttacgttaacttaatcaaagtttaccttaaaagctacaaacaaaattctaacaatgaataggcacaaatgtattttataaatagacttgcagctctaaaaacacagctaactcaggcacgtctcattaacatttatgaaataaaaattccaatttcattaatttattcaaaatgtatttattgtgttgtctgtagggtaccaaacaaccaaacactgtttgctctggaaaaagccatccaaaggtccctaacaatcagtcatgtagcatttaaattagattatggactgtaaaacttttatttgcaaattacttcttcatgtaaaatcaagaacatttgtaaatggaagaatttaattagtaattactaattatattttttccataaaaattttggaactacaattccatccacaccagaatattagatttactaagaatcataagaaatgctaagttaactatacagcagtgatttaactgtggttattactggttttacagaaatcaattacaattattcaccaaattttaaagaataaaacaccaggccgggtgcggtggctcacacctataatcccagcactttgggaggctgaggcgggcggatcacaaggtcaggagttcgagaccagcctggccgatgtggtgaaaccccatctctactaaaaatacaaaaattagccgggcatggtggcgggcacctgtagtcccagctactcaggaggctgaaggaggagaatcacttgaacctgggaggtggaggttgcagtgagccgagattgcaccactgcactccagcttgagcaactgagcgagactccatctcaaaaacaaaaacaaacaaacaaaaacaccaagtttagaattctgtatgcttatacctgaaactaaaatgttaatatgtttacatagctaagagaaaccaaattataatagtactgatatatgaaacacgaagagtctgtggtttttaaatttaccccttatcacagccaaaaaaaatctgatttatagcaagctttataaaagcacttctaatgtgcaccgaagtttagttctgtgggactagttactaactagctgtagcacctcctagggttgatcttaaagatgaacctgtcttcttcaatgtggtttaccactggcagccatccttttactgcaaacctgccatcaattaatttatattttcgtatacacattcagaaaacaaaacaacaataaaaaaagaaaatcatacaacttcctgaaaattaagagtggctttctactaattaaaaagttgaaaatctaaaattagtgaatgcttaggtattattttaacatacgtgattgaggggatgggtggttggggggctggctaaatacaaaactaaggaagcaaaaagaagaaaagtggttcacgtttccatactgtcacataccaatctcatcactgtcaaagtcatctgagtattcagaactcctttgtctggctgagcgagctgtaattgctcttattagctcatcctgaaatgagatactgaaatcaatttccatccaaacatggaggtatcatattcacaagtaattctttaaacaaacaatgcttgattaacgactgctttcaaacttaggtttcattcatctaacaaatatttcctgcaagctcactttatgccatgtacccactttacgcctcatactcaatgcagagcatcacagacaagagcccttcctcatggagctcgcagtttaactagaggagacacacattatggaacaaattaattgcaggttataattagagctggagggtaacaaataagaaggggctcaatttagattataatttattaaaaactggtattttgaaagaaattggtatttttaagagcttttgtctcggcatatttcagaaatggatgcaatcaatattgcaaacttagaggctgagttcaaaattgcagtgactcaacagaaaaaaaaacttaaacattatgttacaacagaaaaaaaagtttttatataaaaatggcaatttaaggttgcgattcaacttttaacttagtaggaaactagtattgaggctactttggtagtcttaaaaccatataggggagtttgtaatactggatggagcccaaacatgatcatgtgcaaaacctcaaaagtaatataagatttacccctgctttatataggactgttctagaatcaccaatttcaacccatctaatacagtgtttacactgtgaaatgattccaaataaaaatactttacctggaaagtagttcttttggtaacttttggactctttgtatatgccaaagtggtgctaaaaacttcatcagacatagtgtattttttctcgttacctttataaaatagctaattattagaattcaacttctgatagtagctgaaatatacaaaacaaatcagacttcgcatgcttcagaatttattttattacatttgattctactctccccacaaaggtcaaagaaaagcatctgatatgaacattgggctacatcttcacttaaaaaggttcttgtaaagaaatagcaaattctcataacaagcttgtttaaaaaaattcaaatggaagttatcctaaaatagttttgcaactacttaaaaagtctgcaaataaatgattacaagttaatacgacaaaatgctgccaattaaaatagaacaccttatttttcacctctcttctaaagtataacattgccttcaaaataagtcacgtcttatttaaaaggccatcaaaaggatcgtcggcgtaaaaattatgagcaccaccaccaaaaaaaaaatgtatctatatatttgcatacagcgctattcaaagaaaaagatcgtaatgctaacccgcaaacagccagcgagatgtattgcaagccaatttttcctctcacaaaagtgttaaagagagccagacaaaacgacgaagctttcgcgatgagccgcattaaaatcgcggtttcccgtactcggagcagaggcctggcagggccgcccatagcgttgtgcgccccgggttccgttccctaccaggccaggtgacgtccgggtgctcgccgctcctcaccgcgccgtatgctgagcaccagcgaacgccaggcccgtgcacgtccaagcgcggtctctgtccggatcccccatggcccccaggtcccgctttctgttcccggccccggacgcccgcggccagttctccgcgaccctgagaatcaagagccaagcatcgggtaggagctgctcaccttggtctgggcctggcggcgcccgcagagccggtcctggaccgagcgaggaggaggggctaataacagaggcggagggcggttgctaggaaacagcgtcttcgggaggaagtgacttccccaccgccgggtctctcgggtacccaacaccgctcttcggcccaacgtgtcgctggggcaaccacccagacgaaggaagtgacatcaccttcctgggtctttggagaggggctcattattggtcgcttgtgtgcatgtgctgttgcctaggagacaggacccgcccaactcccacccagatagccttactcttgccaatagagtaagggtccttatctgcacgtgttgcaaataaagcacattcgtcgttttgccacagttaggacgtgaagttctctgaatcgaagtacggtgtcagtggatgggacagaatagtacggtagtgagtttgcagaaccctgtttccgactgcaggtttgaatcctggtacccctttcctacacacgtgattgtcccaagttaaggtctttatgactcagtttcttcttctgggggaaaacaaaagtgtactaataatagacacctgaaaggttgctgtaaaattgaatgaaataatacaagtggaacacttggaagagtgcctggaattgtattcgatattagatatgctcttcatgcaactaagccgcaaagggcctggagagacctcagctcttgtggacacaactgaaagcccatttgacatcttacttgaatgtaaaactccccctctttgtatacttagtgagtaatcttattccaatcaaaccaaacaaaatgatccactaggctaaaagagcatgtgctactaaagtaaacaaaatcaacatcatttaattcgcataggaaattcttaaagcaaataaaaaccaaaaacgtttattgaaagtctttaaaataatatgaatttttactatttttaatttttaaaaagcttaatcctagttgaattatctgaatgaattcattgactagtaattaaactcatacctggtattttttccacatctctaaaatatgttaatatttcactaattcaattttgtataaacaaatcacattgagatagaaatttaataaatcaatgtattgaaaaactaaatgtgcataacaagaaataagaaatttagtaaaatacaatgctgtattaatcagggttctctagatggacagaactaatagtatatatatattatattatatatattatataatatattatatatataatatatattatataatatattatatatatatgtccactcatctgtatccatttatgaagctgaaaatgtacaccacctctacacacacatacccagaatagaaaatgctccctattttctattaactcatggcactactgttgaacccttccaggttcacctcatgctcctggaacctcctttccactgtaaaacattctctcactttttcctctataatcgcattcttatcttagctaagcaaaactattttctgaataaactatctccctgagggcttttcaaatagggactgctgtagaaggaagatttctaagttctcctaggtcctcacatactcagtgactgctctcctattactccaaacccttcctcctcacaagccaatattctatgttctatttctcagtttctgtcatcaatagatatataggcccttctcccacattcactgaatatctacagccaacctatccaatacctgagatcacaccaaggtatggtgtggccatgttccattcaatagaattctttgctcaatactccaagactttcacttgtccatacccctaattgtggggctccgtactggaagtcttaaactgtaatactccactccaaaaggcccatggcttccttttttagttattcttctcttgttatttctatttaggaactcatcaagacatctagactctttttttttttttttactttttctttctttcttttttttttaatgcatgtatctcatctaagatgtccagactcttgagcttttcacatcttcccccaatttatcagttgctctctttgcttcctgcttccctttcctagctagcccaagtcccacaatgtagcttatggagttctttcttcagcactttcaactttctcacttcatcattcctctgggacacaaaacttgtccattgatcatccaaattctttgacccaacgtatttcagagtaatagtgcatcaatcccagcttacaattttattttatttttagagacaggatctcactttttttgcccactactgggctcaagcgatcctcctgcctccatctccccaagtgctgggattacagccatgagccaccatgcccggccccagctcgcaactttctgtgtgacctcaggtatgttacttagacactcctaaccccagtttgtgcattcataggttgggataataccaaccccttccagtgccattttaaagatttcatacaatactttgcacaaatacatatgataaaattatttccccactcaggacagtgcccagtagagctggtgagtcagtaactgtggttcccccgctttccctctccttaccaagctcaccttccaccttccctctaattcccgtccctattctctttcatgtgtttacgtgcctgtctcttccactagaatcagtttcttaacagcagcagtttctcaaaattgacagtttgagcagaatcattctttgctgtgggggctgtcctgtgcatagtagaatggtcagcagcatcccactctccaccccactagatgccagtagcaccctccaagctgtgacaatcaaaaatatctctagacattgtcaaatatcctctgaaggacaaaatcacctcaattgaaaaccaccgcactagagtaatggctatcaaacttttttgaacaagacctacaataagaaacattttgtacatgtatatacacacacagtatgtgaaataacttcatcaaatcattctttcccttacggtgtcccactctgatatgttctattctgtttaaaaaacaatgactagactgagcctcaacaagaatagtaatcttatctgtttcatctttacactcacagtacctaggcaaattttgtggcacacaagaggaacacaaatacttgttaaattgcaatgaataatcatttctggtagtcaataaagagttttagttaacagaagaaaaacaaaaattcaatttgttttctggttgtgccgtgttcaaaattgaacaccacccttggcagcttccaggagaaaaagttcttcgcctttgctctaaaatattctgtagcctaatcaatgtgagcaaaaggcaaaaatctactaaggtataaaatgtttttatatactacatatataatgtagtatatatgtatactgattatacatatatgatgtatacatagtatatatgtatactgtacatatgtacatagtatatatgtacactgattatatatatactacatatgtaatgtagtatatatgtatacatatatatgtatatatgattatatatgtgtatatatatgtatatataatcatatatatatacaacatataatcattttatgattatatactacatagataatcatgtgtgcactaggcagtgacctaaaatgccaatgactatggccaaattactgacagatacaagcctgtgacttaagccagccactcagaagaaataagcctccctttccttggagacattttctaaaactataaaaataaaaggcagaaattagtacatattcatgtaacaactacccccctccctaaaataacttctgttgtataaaacccaaagattaaaaactacaacattggatagaaaagctgagtctttcaataaaaagaggaatgggacaaataaactcaacatttttttaaaaaaacactcatcatttttcctgaaagtacaatagttcctccttatccaagagggatccatttggagacccccccagtgcatgtgctgaaaccatggataataccaaatcccatatatactatgttttgtcctatgcatacatacccatggtaaagttgaatttataaactaggctcagtaaaagataaataacagaataattataacatactgtaataaaagttatatgaatgtagctctttttctctcaaaatatcttattgtaccgtaccataggtaactcacactgtggataaagggggactactgtacaacaatctcaccatttgccaatattcccgaaccggttttagcttttctcctcctcccttgtttgtttcttttggttcaatgctgctgattattctctaagaggctcttctagctccaatcacattcttatatcaacagataggaggttcttcaactgacagctacacatccacccctgctactttcttcattgcctccacagtttctataaggaaaaggcaaaatcttcatacctgcagaattagcgccacatagatgctgccaaagggttttctgcctgtgccctctggagaggtgacatcacatcccccactgcaccagggcccattgagcaacacttggagcaaccaaggggtgccacaccagaatgtggggaccagtgacttcagggattgctgggaagcaagccccaaggtccccagggcaccctagggccttccttggaaactgtactgccctcaatgctctggcaacatggtcctgtgatgagagtgcagcccaagcaatttacaaaacaccttccgggttgctctttcattgtcctggtgaagagtacagtcctgatccatgtctcctgattcacaacctttgtgttctctcccacactttatttgttaaaatatggacaggctgagaagaataaaaatttcccaaatctttaagttctgcttcccttttgataacttctgtctctaaatcattcctcttttctttcattttcccatacacattcaagagaatcaagctgctccttcaatactttgcttagatatttcttctagcaaatttcagtctcattattcataagttctgccttccagaaaacacttgggcatgaacacaatgcagtcaagttctttgtcactttgtgacaaatgtcgcctttcctccagtttccaataacatgttcttcatttccatctgagacttatcagaatgacctttcttttccatattcttttttttcttaagagactgggtctcccctatgttggccaggttggtcttgaactcttggcctcaagcaatcctcctgcctcagcctcccaaagtgctaagattccaggcatgagccaccacacccagccccctccatattctacaaacattctatccagctctcctcatctgagctctcaccagaatcacccttaatgaagagtcacaaggagaagacagccacccacacctcaggagacaggcctggaaaaaagccttcctgcaccgccctcagaagggacccgcttgctgacaacttgatcttagactcatggcctccagtaatgtgagacagtaagattcagttgttgaaggtgcctagtctgtggccagtctgtaagacagccctagcaaactaacacagcctgttagcccacggatggtgaaaagatggagtgcgcaatggagctccaggcttactgtctgcagttcccaaagtgtgctatgggaccctttggtggatgtaggtatgaaagataattttgggtggtgcagggtgaataatttcagtttacataataatgtaagttcacaagcttcctggggaacctagtgacatgaaggcactgcagagcctccccagaagaggtgtcagcttttggtggatccttgagcccaggaaggcaataggcgagacatcaccgttcaccagaaaacacgatcaaaatccattgaggaagggcagcagtcaaaggttttattctctagaaggaactctcaagaactgcaagcagcaggcagaagacttccttgcatgtgtggttaggcgatggtgacctacggttttcactgcgaactgggatcgagtgacccgacctcctactcatgcacctctctccctgtctctctctgccttttagtctctcttcctatttctctccctactcttcctctcaggctcctctgtctctctccccatctctcttcctctctctctatctcactcccttctccccatctctttctgtctccttcttctccacttctgtctccctcctcctctccctctctgcagctgttcaggcaggactcctaggccacctttcagggtacctgcagggcagcaggaccttggcccccatctcccagcaccctcaaggtcaggggtgtgcgcctttccatgctctcctgggtgggcaccccacactccaggaagcagaagctgcaggtcactgctgactcgagtggcacaccgacggggtgcttccacttgtaattgtgacttccatcttgtgatctgctgaggtcaaagcagaggacacatgctcaggccggaccctgcaccagggtgggggtaggggtgggttcgggggtagaggcggggatggcagcaaccactgcaaactgtcccctggccggcttcctgtccttcacctgccatgcaaggccccctctcccgcccctccccccgcctcccaccacctccacccctaggcagccccagaccccggctccagaattccccctggatccaggaactaagagcaacccatgggctctgcagcccctaggccaggtgtcagctgcccctgctgcatgctgaaaaaccttggctctcacttatgccccgacccaagccagccacacacccccagcgtaaccaccttctcctgactttagccctgacatccctgctttctagtaatccccagctccaggcaagcccgaaggccagcaccctacactcacccttcctgggtgccactcttgtctgcttgccaagatgtcttgatctggctttatcagcatagaacaaataaagggcctctcccaggaaggtttggcaaaacactctccatttagaagcaggggcagtgacaagacctagggatgacccgaggtttgccactcaagcagcaagaagggcaaggagccagtttcatgtcctcatcctggaaggatggccagggctccacagggtcctgtggggggctggcaggagcagatctgccctcctcttgaggaagcaggccaccaccaccaggaagcaacagatggtagcgtacaggtagagcccccacgtgctgtagagcagggccagcagatctgcactcagcccagccccaggggagctgcaagacagactgagaccccgataggtttggctctgtgtcctgacccaaatcccatcttgaattgtaatcctcatgtgtcaagggaggaacctagtgggaggtgattggatttggaggcagtttcccccatgctgtccccctgatagtgagtgagttctcaggagagctgatggtgttaaaatgtggcactttctcattttccactcactgcctcctgccgccttgtgaagaaggtgcttcctcttcaccttctgccatgaatgtaaatttcctgacttgtgagtcaattaaacctctttcctttataaattacccagtctcaggcatttctttatagcagtgtgaaaacaaactaatacagaccccttctctgaagtgtcttctccttgggccatcagctgcccccatgctcttcctctgccccatggtcttccttttcccctcattcggcccaagtgctccacatggccagccccagccccatcctactgcaggcctgtctggctggtggagaggctgggctcctttcctgaccccaaggatggctgacatgctctttggatcttggaggaaactgacctcccaccctcatactggtagcaacttcttccaagaccccaaagctggaccatatgagctagtcttttttgttgtctttgcttgctagggctgtcattgggacaggccttgcccaggaagcccatgtggaccgcgacaccaggccctgcccagacccatcatgactaagagggaggtcgggagatacccccgctgcaacatgggcacctgcatctggccccgttggtggccagtgactggcatgcctggaaggagccagggtagcaccccaccagctgccccgcagccccagacaccttggaaaatcctgttcaatgggaagctggtttcattaaggccatgagagagaaaggtgagcatggtatccctgcagccccggccagccagcagcatgccctggggcctctgtcccaaactgtgcccctctcttcccagggcctagaccccggccctgggaagagaggggcactaggggtgtggtgggctcccagctgcagtcagcatgaccatgcaggggaccctggcactgtggagctctgtcattgtcacagttcacctcgcagaagctgggtgagatcctgaagccttgcagccactgctatagccacagcaggggctgagattggctttcactgcactgagccacaatgtggacatggactagctcgccctacagtgcacacagcactgcttccaaccagggcaccccgttcacagctagggacgtgcagcagtgtgctcccaccttgaagccttggctctgccacctctacttggaatgttctcagttccttccaggcttctagaaccatctgggccagggcttatggttggataagcacccgaggtcccacaacccaaacaagcttccgatcctcgttttattttttgttaaacttatgaaaatttattaagatatgacttacatccctgcatgtaagtgttcagctcaaaagtcattcaaagatagaacacaccagcccccagatcacaaagccaaccatgcccagcccctcccagtgcccctagtcctgcaaccagtgttctgaattctgacagcattgtgagcctgccttttgtactttacactcatggaagtataaccaccttcctgttttaaaataaatgtttacttttgaaatgattttagaaatacaccttccatccagctgcccctaataatgacattttgcattaccatggcacatttgtcaaaactaagaaatttaggctgggtgtggtggcttgcacttgtaatctcagcaatttgagaggtagaggcgggaagctcaggtttgcttaaacccaggagtttgagactcgccttggcaatatggatagaccctgtctctagagaaaagtaaaagaaattagctaggcatggtggcatgtgcctatagtcccatctagtcaggaggctgagtgggagcattgcttgatcccaagagttccaggaagcagtgagctatgatcacaccactgcactccagcctgggtgacagagtgagactttgtctcttttaaaaaattaagaaacttaacatgggtgcaatcctattgactacatgatagtgtgaactattatctaaggttattaatgcagtaattatgttaatatggtgaaattttttcagatttcatccgtttttgcccaacttcccatacctgttccgggatcccacctcggactcaccctctgcctttaggtcatttctccttagcttcctccagagagtacagccagacacacacctgggctgaatggtagagctgattgctcctgggctccaaacctctgcagcatgttaccatactgagaactgtagaaaatcgtaacacaatagtggctatttgtgtatctaaacacaaaaggcacataaaaatacagtataaacactaaaaactggtacacctggccagttgtggtggttcatgcctataatcccggtactttgggaggccaagttaggaggatcacttgagcccaggatttctagactagcctggacaacataaagagaccccatctctttttaaatatcaatttttggcaatggtacacctgtatagggcagctccattataatcttatgggattataagcaccatcctatatacattctggcatggactgaaatgtattatctgacacatgattgcataagtagtctagagatgatttaaaatatactagaagatatacttaggttatatgcaaatactgcaccattttatatcaggacttgagcatctgtggattttggtatctgtggaaggtagtgaaactgattccccacaaacgtcgagggacaactgtaaacatttcaggccacacagaaggctcaattccctgcatccctacccccaggtaaactctatcactggagattagtttgcctgaccataactttacataaatggaatcacatattgtctattcttataggtctaactcaatatgaggttgtgagattcattcatgttgtagccataatttattcattttctttgatgtatagtattctagtctcgaatgtaccatgggttttttttttttatccattcttctgtgagatatttgggaagtttctagtttgaggttattacaaatagtgctgctatgaacgttgttttacttgttgtattagtccgtttcacgctgctgataaagatatacccgagaccaggcaatttacagaagaaagaggtttattggacttacagttccacatggctggggaggcctcactaatatggcagaaagcaagaaggagcaagtcacatcttatgtggatggcagcaggcaaagagagagcttgtgcacagaaactcctgtttttaaaaccatcacatctcatgcgacccattcactatcacgaggacagcacaggaaagactcactcacatgattcaatcatctcccacccagctcctcccaccacacgtgagaattatgggagttacaagatgagattgagatttgggtggggacacacagccaaaccgtatcacttgtattttagtgaagatatagacacatctgtgtaacgtacatgtgcagggttgaaattgctagttcgtggcaggcaaatgtttagctttggtgaatattgccaaatcaaagtgtttgttccactttacctgctcatctgtgagccagagtgttccatcaacagtttgagctgtctaagaaggacctgagttcaatcccattcaatcacatagtagctgtgtcactttgggcaagccatgtaacttctctgagcctcagtgctcagtgtcctcatctgtaaattgggctgatggtggtccttacctcgcagggccgctttaaggactaagtgagatgaaagctgataccccaagtgacaacacttctccctccctcagattcaataggatgacatcttcactgcccaatgtgaaggccatggggaggactcgaagccccagagttcccctgtcccaggagcataagccttggatttttgctttcaaaaacaaccacctgtaggatcaggatggctctcaacttccccaaatctgtgctcccaccccatgaaggtgacgtgttcagcagcggggaagggactgcattgtgccagcctcaccctgcccactgtctgtcctcatgacttgagcccagctagttccccaagcagagcagtgcagggtcctgccccggccatgggctccagacatccgggccaccactacctgttcctaccctgctgcctccatccctcagcccctgcttgcctccttcacagctcaggttgtcttagctttttacctgtctccatggtctgtctcatcaaggggagagcagcacaagggaagggactctgtcagtctagggatgtgtctccagtgcgtgggagagattagcagctcaatacacacttgcccagtgtctgtgtgcatctcactaagcagaagacagctttggagatgagaagagaccctcctgaggtgacagtccttagctggcatttcccaagtattctcagcatgacaggtgctgagccggaccatggacataggagctctggaaactgtggggtaccggattacaggtgtgaaccaccatgcctggtcagaagtattctttatttcttttttaaaatttgtactttctgagtttatgtaactggcatgtactgcttttgtaattagaaacagaaaacgtatagagaaaatgtgtagaaaaaagcagaaaaccaaatcacatctacaataaaatcctagcttttaagtaaaatgtgcagaggagaaagatggaaaaggaatgcagtactccaggtgtggcggctcatgcctgtaatcccagcactttgaaaggccaaggtgggaggatcacttgaagccaggagtttgagaccagcctgagtatcatagtgagacctcatctttttttaatataaaataaaaaatattaaaatagaaatgcatgaaaacattaatagttggctgggtgtggtggctcacacctgtaatctcagcactttgggaggctgagacaggtgggtcacttgaggtcaggagtttgagaccagcctggccaacatggtaaaaccccatctctactaaaaaaaaaaaaaaaaaaaaaaaaaaaaaaaaaaaattccgggcatggtggtgtgcacctataatctcagctactcgggaggctggtccagaattgcttgaacacaggaagcggaggttgtggtgagccaagatctcaccactgcactccagcctgggcgacagagtgagactccatccacaaaaaaaacagaaacaaacaaacaaacaaaaccacaaaaacctttaatagttgctgtctctgaggactgcggttatcaggagacttaccttttctgtctttctagttttttatatgttcatatccagattttaatgtattatacgaacctattcctttagtagcctcctaaatagtctccctgcttcccttcctgcctgtgatgtacaaaggcttcccatggcattgtgctggagaaattatgctgctcctagtaaaagtcttcgttctctgtgcctagttaatctccacttacccatcagtactctactcaaggtctccccaacttctttatggaagacttctgtagtggatgctgtgacctgccacccagatgtcacttcaggaccaggccctcattccccagctgctgggagacttggaggctgatgctggcagatgagtctcactctggaaatgccgtggctgaaagaagctgcctggggacagcctgcatccattacctggtccactggaggagggagatggggtgggcaataaaagctcagacccctcgcctcaattcagtgcaattttgaagggtcatctaccatctaaaactccctgtgggattggctaagacctttgttgcaactccagtgcggttttctctgcctgccgaggcctgctagcttcaccctctcacaggtgctggtcttaagggcacttcccaagaaacttccttagccagtaacaccttcttgacctcccaggctagggtagtttcctttattatatgctctttcagagcacgtatctcctttctaggttttacatctatttctgttatctggccaatgtctgcctgtcccatcaaatgtgatagccacagggtgggatctatatctgattttattcaccattgcattcttccatgcgggcatttggtttagaaatatttgtcgagtgaacaaacaacattattaaccatttaatcccttaggaggccatcaactttacttagggctgcagaatgtctcattcattcattcaataaatatttacaaagagaagctggattcctaccctttcaacaccaaaataactccagatggtttaaagatgcttatatataagagaatgaaatcaataactttctagaataaagatgagtagattttagaaaaaaaatggaatattaagggtcttcataagcatgaccacataaaattctaagcctttataaagcaaaaataaaaattaataagctggccgggcatggtggctcatgcctgtaaaactagaactttgggagactaaggtaggaggattgcttgaggccagggactagcctgggcaacatagtgagactctgtctctacaaaacaaacaaacaaacaaacaaacaaaaattagctgggcatggtggtgtatacctgtagtcctagctactcaggaagctgaggcaggaggacagcttgaggccatgagttcaaggctgcaatgaaccatgattgattagacctgtaaatagtcactgcatttcagcctgggcagcatagagcccatctatatttatatttgaaaaaataattaagacaaacaaagaaaaagtatttgcagctgagtgcggtggctcctgtttgtaatctcagcattttaggaggctgaggtgggaggatcgcttgaacctagaagtttgagaacagcctagcaacatagtgagaccccgtatctacaaaaaatgcaaaaattagctgggtgtagtgatgtgtgcttgtagtaccaggtgtactcaggaggatgaggagagagaattgcttgagcctggaggtctgggatacaatgagctgtgatgacaccactgcactccagcctaggtgacagatcaagacccagtttctaaaaaaaaaaaaaaaaaaagaaaagaaagagaaagaaagtaaaaaaaaatttaaataaaaaacagtatttgcaatacttacataagacagctaatataccaagaacccttacaaatcaaaaggttaaaaagcctacataaaaatgggcaaagaatgtgaaaaactattagaaaccttatttatattctaggaaattcaaattaaaacaataatacaatatctttttttctataaaattgactgagttgaatgattgacaatatccagtcttgacaagagcgtagataaactaggaatttaattcacacttgttggaaaaattgtcctgaactctttggagtgcagtttggcaatatctattaaattaaaagcattcaccatttttttaacctcacaactctacttctaagaatgtatttgtctaagagcatgcgtttgtacagattgtacaaagtagagcattgccacatttataattacaaagaaaaaagcctaggcaacatagtgagatcttgtctttacaaaaactttagcatggtggtgctcacctgtgatctctgctactcaggaggttgaagagagaggatcacttgggccagggaggttgaagctgcagtgatctgtgatcacaccactgcactacagcctgggtgataggaggaaggatcacttgggccagggaggttgaagttgtaatgaactgtgatcacaccactgcaccacagcctgggagacagagggagagggagaggcagagagagagggagagggggagagggaaagagagagagagagagagacagagagacagagagagagagagagagggagagacagagagagaaagaggaaggagggaaggaaggaaggagggagggagggagggaaggagggaaggaagaaagagaagaaagaagaaagaaagaaaaagagagagaggaatgcttcattaatgcagattgcttaagtacattgtgattaattcatacaatcaaactctaataaacatctgtcttaaagaatgaggcacctctctgcgtactgaaatgtactgtatgtacatttgtactgaaatataaggaagtgtgtactctctatgtacatgaaaagagtccgtcatgtattaagaggaaaaagcatgtggtaaatgaggttatttcccattttggatgcatggaggaaaatatggtgtgaatgtgtgtgagagagagtgcattagattaggcacagaaaacacatctgcagacacatagcacaaatgcttactaatggagagttgggggtgatgggcagcttctaccctctctgtcatgtgcttccttgtgtttgatttactaataatgagttcacatgacttttgtaatcctagagagaggacagcacatacgaaggtctgaagcaataggatacatttagggaaatgctaaaattggtccaaaaaggatggcaggaagagatgatattgaagaggaaggcggcaggcaggtggcccaggtgagcccacgctgtgccgaggagtgcggggttcatcccggggcagcaggttttctttgtcctcactggcagctcctctcagtttctgaggctgcctcctcgttttctgcccacatcagagtgtgggaatttctaatctaatccctcgggaggccatcaactttactcagggctgaagaatgtcttattcactcaataaatatttacaagctctgcactttggctcatgcctgtaatcctagcactttgggaggctgagatgggaggatcacttgagtctaggagttgaagagcagctggggcaacatagcaagatgtgtctctacaaaaaataaaaaattagccaggtgtggtggcacacacctgtggtcccagctactcgggaggctgaggtgggaagatcgcttgagcccagaaggtcaagtctgcggtgagccttgatcacaccactacactccagccagggtgacagagtgagaccctatctcaaaaacaaaaacaaaaaaataataaaagaagaagaaaagaaatatttacactggatttctacagattcaatcctgctgaaagtcagtcctacttcctcatctcttcttcgtctacactgtctccttctgtgatatcatccatattcctggctgtaaaaaacatctttgtgtgcccactcccatgtcctctctcctgcttgatttccctctgagcacagactcagggatgtaattttctccttggcaccttcatctgatagtcatctcacatgaaaaaattaactttggcttttagccaccccaccaacttgctcctcttctgaccttcatctcagtaaacaatgccaccatccacccacttgccaggaacagacacctatggagtcttctttatctttactttcatttctgtgacaaagactagctctattgcccaggctggaaggcaacctccacctcctgggttcaagcaagtctcctgcctcagcctcccttgtagctggaattacaggagtgtgccaccacgcccacttaatttttatatttagtagagacgaggttttaccatactggccaggctgttctcaaacctccagcctcaagagtactcagcctcccaaagtgctgggattacaggcgtgagccaccatgcctggtcttaaggagtcttcttgatgcctctcttttctttcctgcatccccctctgccttctaatccattatcaaggttggcctgttttatatccaaaatagacctcaacttgtccacttgtccccatcactcttgccacccctagtccaaagtgcagaaataaacacagagcactcaaatgagaacaaacaaagtcagttattcagtttgctataaaagggaggtggccaccatcacctgcattcggcagagcttcaaaggaagggcaagggctgggaatgctttcttcctttctttttctttctttcttttttttttttttttcttgaccaagtctggctctgttgctcaggctgaagtgcagtggcgcaaacactgctcactgcaacctctgcctgtttcccagcctcaagccatcctcctacctcagcctcttgagtagctgagactgcaggcatgaaccaccatgcccagctaattttgtttatattttatagagatgagatttcacaatgttgcccaggctgatctcaaactcctgggttcaagtgatctgcctgcctcagccttccaaagtactgagttcacaggcatgagccactgcacccagcctcttttcactttcttttttttttttttttaattatgattatactttaagttctgggtacatgtgcacaacgtgcagctttgatacataggtttacatgtgccatgttggtttgctgcacccatcaactcatcatttacattaggtatttctcctaatgctatctctcccccagcccccaacccccggacaggccccagtgtggtgtgtgatgttccctgccctgtgtccaagtgatattattgttcaattcccacctgtgagtgagaacatgcggtgcttggttttctgtccttgtgatagtttgctgagaatgatggtttccagcttcatccatgtccctgcaaaggacataaactcatcctttgttatggctgcattgtatttcatggtgtatatgtgccacattttctttctttatttctttttttttggagacggagtctcactctgtcgcccaggctggactgtagtggcgcgatctcggcccactgcaagctccgcctcctgggttctcgccattctcctgcctcagcctcccgagtagctgggactacaggcgcccaccaccatgcccagctagttttttgtatttttagtagagacggggtttcaccgtgttagccaggatggtctcgatctcctgaccttgtgatccatccaccttggcctcccaaagtgctgggattacaggtgtgagccactgcacctggcccacattttcttaatgcagtctatcattgatggacatttcggttggttccaagtctttgctattgtgaatagtgccacaataaacatatgtgttcatgtgtctttatagtagcatgatttataatcctttgggtatatacccagtaatgagattgctgggtcaaatggtaattctagttctagatccttgaggaatcgccacactgtcttccacaatggttgaactaatttacactcccaccaacagtgtaaaagtgttcctatttctccacatcttctccagcatctgttgtttcctgactttttaatgaccgccattctaactggtgtgagatggtatctcattgtggttttgatttgcatttctctgatgaccagtgatgatgagcattttttcatgtgtctgttggctacatagatgtcttcttttgggaagtgtctgtacatatcctttgcccactttttgatggggttgtttgttttttcttgtaaatttgagttctttgtagattctggatattagccctttgacagatgggtagattgcaaaaattttctcccattctgtaggttgcctgttcactttgatggtagtttcttttgccatgcagaagctctttagtttaataagatcccatttgtctattttggcttttgttgccattgcttttggtgtcttagacctgaagtctttgcccatgcctatgtcctgaatgctattgcctaggttttcttctggggtttttatggtttcaggtctaacatttaagtctttaattcatctttttttttttttttttttttttttttgagatggagtcttgctccgtcacccaggctggagtgcagtggcacgatctcagctcactgcaagctccgcctcccagattcacaccattctgctgcctcagccttcagagcagctgggactacaggcacctgccaccacgcccggctaattttttgtattttcagtagagacagggtttcaccgtgttaaccaggatggtctcgatctcctgaccttgtgatctgcctgccttggcctcgcaaagtgctgggattacaggtgtgagccaccacacctggcccttttatccatcttgaattaatttttgtataaggtgtaaggaagggatccagtttcagctttctacatatggctagccagtttttccagcaccatatattaaatagggaatccttttcccatttcttgtttttgtcagatttgtcaaatatcagatggttgtagatgtgtgttgttatttctgaggcctctgttctgttccattggtctatatctctgttttggtaccagtaccatgctgttttggttactgtagccttgtagtatagtttgaagtcaggtagcatgaagcctccagctttattcttcttgcgtaggattgtcttggcaatgcaggctcttttttggttccatatgaactttaaagtagttttttcgaattctgtgaagaaagtcattggtagcttgatggagatggcattgaatctattaattactttggacagtatggccattttcatgatatggagtcttcctatccatgagcatggaatattcttccatttgtgtcttcttttatttccttgagcagtggtttgtacttctctttgaagaggtccttcacatcccttgtaagttgcattcctaggtattttattctctttgtagcaattgtgaatgggaattcactcatgatttgcctctctgtttgtctgttaatggtgtataggaatgcttgtgatttttgcacattgattttgtatcctgagactttgctgaagttgcttatcagcttaaggagattttaggctgagacaatggggttttctaaatatacaatcacatcatctgcaaacagggacaatttgacttcctcatggtgtctttggaagtgcaaaagttctgaattttgaagaagtctaatttatcaattttattgtattctatctatctatagatctatacatacacacagttctgatttgccatggttcgacttaacaacatgaggttaggaggggagtgaggacatgagtgtgtggtagtgaaaaaggtgatactgaaagtggattggaggctctgataaagcctggtgtggaggggaagctagagcccatgataaatgagttgagatgattggaagatgagtgcaagaaactgcaactgagggagcacagggtgtaccctgttggcgacagacgggcatgggttttgaaagtggaggaagacaaatggctcagaaggtaactgaatgaaaagagggtacccacatcccctcctggccttcccaggatgtttctcccctacatctctcagagccgttctatctattgccaggttgcctgaaaaagcccatgacaactttggtggcttcagttttaaggctgatcagaccatttttggactttgttcctccttacagcctggtccacagcctggttctgactgcactgcacaggtggtagtgatgtgtcttctggaacaagcacctatgggccacacgggagtcttgtccctagagagaagccttggtttcttctcctgtaaaatgcattccatcatttgtctattcaaacatgtgtgaaacatcgctgtgtgacaggcctattttctttcttttccttacatttctcagccaccctgagggagaagaattatcattttttatttatttttactttttattttgtagggatggggtctcactatgttgcccaggctggtcttgaactcctgggctcaagcaatgtggagacggattattacactcatttttacagatgaggaaataaaagctcagagagctgaaaacctttgccgaggtcatatagggtctatctgagtccagggagactcaccatccagttagggaaagaatcaggtagggaaagaataaaaagtaagttggtgtacagaattgtataggaatatggaagttagaaagattactcctgttgtgggagaggtggtgttgtgcatgtgtgttaggcccccaggatgagtagaaatttacatggggagatggagaggaaggaccgcaggcagaagtgatagcctgagcaaagacaccactacatgaaactccatggtgtaacaaagattgttgagttaaaggcagagacaagattgtctataagcctggggttcatggacagcctcaaggggggcccacaaacctccagacgttttaacataattgtggatgtctatttttttttctggagagaggctttttattttcatcagattcttaaaactgggatattcactcaaaacagccttgagtagcagataaacttggagacatcatcagggccctggaatgcaggaccttgtaccccgattcaggaattcatacttcactctgaggttgacagggaacccatgggttttctagctgggagcaacatggaatgggccttaggaagacaacacagggttactgtgagctgaaatagatggaaagtccttttatagactataacatgatgtgctatttactgccgtattcccagtagggcacagtgctgaggacatattggaggttcagtagatgtttgttgaatgaatgaagaagtaaatgaatgaatgagcacaggtgcatgtaataacaataaaaagagtgtatctctccagggcaacttcgtgcatttcttgaccgatttaattgaaggtgaaatccatgaaccccaagctccccctgcacggcttcaggctctaatagaaatccactgagtcctgagatgatgctaggtgtacggaggggtaagggagagtggatttggtacctgagggtgtggccacaccgggctgcagggtagggctcttcccgcagtgccctgcagtgtctttggaggagtggaggctacactgccaggatggccggatctcttccttttccattgcttgtcctgttgactctgtctccaaaacatgacctctgtcccctccatttcctccatctcctccactcccacctggttcctgctctcccacctggcctgggccaccacaccatctcaaaaccagagtgctggctctgcccttgtatctctaccatctgctcttcatgtggcagcctgagggatctttaaaactctccacctgggctgggcacggtggctcatgcctgcagtcccaacactttgggaggccaaggtgggcagatcacctgaggtcatgagtttgagaccagcctgactaacatggagaaaccccgtctctactaaaaatacaaaattagccaggcgtggtggtgcatgcctgtaatcccagctaccggggtggctgaggcaggagaatcacttgaaaccaagaggtggaggttgcagtgagctgagattgcactattgcactctagcctgggtgacaagagcaatactccacctcaaaaaacaaaacaaacaaaaaacaaaacaaaacaaaaaaagcaactccccatctccaaagaatgtggctttctttccatgaacttaagagtactgtgcttccaaaaatttaatatattttcagagtcatgtgggaattttgcttagatgaagtttgtgattcagttgatctggggttgggctcaagactgcatttccaacaagctcccaggcaatgcagttgctgctgctcttggaccacattaggagtaacaaagacttagaaagaaatgcaaacttccttcccatgtcctactttatctggcctttgcccagctctcccacatcatgtccagcccttgctcctctccctcatcttgctgtggctcccctggccttcattctgtttctggagtgtgccaagctgctcctgcctcagggcctttgcacacgatgttcccactgctccaaatgctcctttcctggaacattccacatggcttgcttttctttatttacgtcttagttcaatggtcagataataattctcagaccacttcacctagtgaagtaccttagctctcagagactctcagctatttgttttttttcccctcttcatagcacttatcattctcagtttattttggtaatctattggtcgactttactttcccgtcctccctcctcaaccaagtatgttccacatggataaggactcagtttccttcagtctgagcctatcccacagcctggcacagagtaagcttttcatgttcctcgggcctgtgcacgaaaatgctcccaccactgctgttggtgtttggatgcacacaagctggaaatactaacggaagtgcctgaggcagaggggaggaaggagggaataagcagactttctctactggagtgcctcagaaacagcctcaagaacctggagatgatgttgaaaccaagaatcaacacataatagatgaattcatctaactagaagagattcattctaggtggaaggtggagaacaaagtaacacatagctcaacgagttaataagcatttggaacagtgtaagtaaatacatagtaagtatttatcgaataaataaataaatatgctgagtgcttattttatgatgatcactttgtattatataatctgttcatcctcataaaacattatcaccatcttgcacataagaagctgtgctaccagattaggagatttgcccaaggccatataaaacttgcccaagttcatagagcaattcagagacagagctgacaaccccactctctaaaatagctccattcaaagttgtaaaggccatattccctgtctcccttctcttcaatgacatgccacttgatagcacttgatacactgtgcattctgtttatctatttgtctgttttctctcaccacaatataaattctctaagggtaagaagctttatttagttcactactcttttccagagcctagaatagggcctgccatgtaaacggcacttaatgaatgcttactgagtgttaaaaggatgaatgaagggattatttaagaatccttattttggccagttgccatggttcgtgtctgtaatcctggcatttttgggagggtgaggccaaggccaggagtttgagaccagtctaagctacatagcaagacatcgttgccacaaaaaatttacaaattagtcagatgtggtggcatgcatctgtagttctagctactttggaggctgaggcaggaggattgcttgagcccaggagtctgaggctgcagtgagctttgattgcacccctgcactgcaacctgggcaacagagccagactctgtctcttaaaaacaaaaaaaaaagtttctccacctctaaggggcagttctgtaaacttgtggctgacagatcactcaaatccaggcaagtagcttttaattaattgaaccaggattggacccagagccagcgttcttaactaacccctgtagttaactctcagaaaagtccatgttctaattcccagaacctgtgaatgtgttaacttgcatttcaaaagagactttgcaggtgtgattaaattaaagatctcaaaatggggagattatggattatcagagtgggcccagtgtagtcacaggggtccatacaattggagtacaagagggtaagaatcagagaggaggtgtgaccacgatggaagcagaagttggggtgatgcagggtcatggcccttagaagctaggaaggagcagggaacggattctcccctaaagcctctagaaggagtgcatccctgctcatgcatttcagacttgtggtctctagaactgtctggagatggtgttgtaagacagtaaatgactatggcagcaatcagatattcatataacccctacactatattttcatatacctgactttttcagtcaagattctggtgctcagaatgggaaaaacatacaactttatgttaataagttgtatttctgttggtgcctcctacacatggcagggaagcaggattgattatggcctgtgcaattaatattttaacctagagaaaaaatgggagaaagcaggaaatgtaattagactgtgccaaagaagtgtaattttgacagttgagttggaagatgaatggtggttgtggggagaagaatttgaaaggagggtagacaaaaaaaaatcacccaaaaagctgtggcatttgctcaggagagatatgacatgcagatgaaattaggcaatatcagtgaatatagagaggaatagatacatttttaaactatggtaaatagtacgattgaagtgtgtgccgggtgcaggtaaaaaaggaagaggggacagcatgatgtcagactgggactccctgagttggaggtgcctgtgatatatgggagtggttgaggggctgagattataaggggagtgaatacagaagggagcagaggataggaccctaggaagcatctatcaagttatgggcagaggttgtacgtagcacagaaaggcaagaaattgccagggaaataggaagagaaccaaagaggagaatggctcaccaataagggagtggctcatgctgcctgttagtcaagtagagaagcaaactagatttttccttaggaggtcactgggatctgtaccatgcctaggtaagagcagtttcaatagagggattagagagaggtgtgctggatctcacacctactcagcagaggcccttgtgcactggagctcatacctactcaggagagtctcttgtgcacatccaagcccagctctgcattcaatgacatcagctttagatcagtgatggtggaattacttgaaatcagcaaatgctacaatgctacaaatcagggtgttcccttctcacatccttccccatcccaagagttaaacattcaccagcttcaactgggagagaagaaagctgaagcatgactgattaagtctgcaagtgaatgggagataaggaagtggggctgagggagttcattatctttccagacgtgagtggtgaagggaaagcgcacagtacagtcacatcttaagacccagataggtttgaaagaacattgctttttcctggaaatgtcccagacaagattgattatatagcctctattgtatcactgaagttttaaggaatctttacttttaatggcatctcacatatataaaaccacattattgttatgtaagaaattaacccagtgctttccttctttcctgatcgattagcacacactgtctttttgcatcatttctcccatgtgtagctcctctgttcatccacctttctggaattgcttggctccttcctgctttgtacatgatccctttaagacaaatctagtttcacacacgaatgcaaatatacttttaggcacttttttgaagaaggatacaagtggatgcccagttctctttgtttgtatgttggatttctgattaagatttcctaaataaagggccccaaactaatgtttgaaaaaaagggggggggagggtaaacatagtttcaagtttttttaatcacttatttacacgttactctttattcaaattgttctattttatctgttatcattatatgcatttgtaagattatgagtttttgtggaattaaaatccagcactgaagaaagcccaggcattacttagtgggaatttctttgtaaaaaaataatcccattcaggattctcaagggaagtccagagcccgactgtaggttaatgagaataaaagaaatgatttagcacgtgcatacagctaatttggcgtcagcattgtgctcatgtaaggatgtaattattcttttgtctcttctgggaagcccagagtatacgttaataatcaagttccagaagatggcagcaaaggatttactatccagaggaaacatgaatgtaatcattagtattcttgagatacttcattttgcttatagtgattaaaagttacattgaaacaaagctatttacatcatttaataaagctttttgaatgattagctttttctttatattagaaagtagaaatttactagtttaatgtgtcaagaaaatattgtttaaatccatgtttttaaaagacttaatgtaagctgctcacctcccaatcctttccccacccgcccaaactcaaccaggatcattgttcatagttagggttctttcccatacttttatcctctatgcacaaaaatggtcatattacatatattattctataacctggtcttgccatttgaaaatctttccatgttaatcaaaaactgaattgtgcattattttatggttatataattttatgtatatatttataagtatggttgttttcaggttgcatgagcagccttgtggtacatgtagttgtttatttagaatacatcctagaggtagaataatcaggttaaagtatatgaaaattaactgcagttatccttcctgccaaaatgccttccaggaaagtctttacaatatacattcctgtgaatatcatgagaatggttttttacctaaatttactcattagatacccttatttcacgcttagaagatggaattttatttcccaaattttattctcattttattttatgcaactctacttactgtctcctttaaacatcctttcatctattgtctcaaagtaaaaactagatatgaaataaaaacataaaagtaaaatgttattttattttgttttcaaagtgaaacattaaagaaaaaagacattatttaagtgtaactgggaaatgctcttttgtgggcaaaaataaatcattttaaatttaatttattcctgtagctattattcctagcattaggaagatacgatttaataaagtactcttgaggaaattcattaggtcacaggaactaacatgaaagctctttatatttaaaacaggcaataatgctaaggcattactaaatatgtaacttcaaaggcactacattgcccaatcacgtactccattttaggcattttatatacatacactgtagccaaacttgagtaaactttgataaaaattttctattatgcaagtttcttaaccttaaaatgaacttctgtgattcttaagtaaatattatagggtgatgcttttattctttgggctggatccagatgtcaacttttcgttttataacagcatgttctttgcaactcatagccaactaattttttctagtatggacaaagaacaaagaatgtgccctgtaaaaattttgtacaaacttatttttcctgcattatatattacgtctccttctctttgtgattaaagcccacgaatattttcttttgaaaagtcaatattatatctgttagataagacaaattttccctattatctaacagcaaatctgcttctttctgttttttttttttattttaatgttttctgttttgttttaaaacttggagtgatatgtgtctgagattggtaggtgttgagaaaaaaatctgtaatatctgaaaaggtatagatagtacaaattttttttgagagggtttatatttcaaaagccaaatcttttgaaagtttggacccacattttaaaaactcactgttttaaatgaagttagacaatgaagtaatgagacatgattttgcatctagcttatgaacatcagtcatattcaaatgtgctttagactattttgttttagacaaagcaattcaagaatattatgtctcagctagagagttctactgtctagatgaactatgctacactcacttgtatgtagttagaatcctagaatgccatggaaataatgtaattcttggtacatggatcctttggataatattatgggacctgtttgaatactttgcaggacatggaatgaatacatcagcgtatgacgcacgtgttccattattggacagctctaattatcacaattttattctttatacttaatcaaagtatgcattccatttttctgtacactgaccatagttttgttttgcagggtcatagagaataaatctaatcttcctttcacatgacaaaactttcatttggggaaagatttatgttaattattagcacactgccctcactttaccattttcctttactgctgtttctcatgttcctcataatttcaaaacccatcaccatcctggttgtgcttttttggataatccatttgatttcatcccttaagagttgtaccttaaggtaaacagagtaacccagatattatttaacctgaacaaggaataatcccttttttaggtatggacactgctaacatggcctgagcttacattagcatcttcctggcagataggctccactcttcgtttaccttgtgtacgtgtaatcaaccaaaatgctaaagctatccagatcccataggattcaaatattctttaaactcaaatgtaggattttaaattttaatgtgttaaagactgtttttgatttgggacatctctttttcaatctttcaatctataggtaacttattgagttctattttatcatccaacatactatttttcagtttcatatttaaatgttacaagtatatctgcttggcacgtgtttatacaagtcattactaaaaagaatattaggatatttaatttatccacatccatgagtacatttctaatcaggttcaatgcaaggtgattttgctattttctgtgggacaattttagaaaagttgaatctatttctgaaccacaatcttttccctctttcccaaggcagcatagcaatatcagggcttacttaggcttggttctcttgtctttggcaatggctgctgaaggaaaagagaatcaagtctaagtaagccttgatattgctatgctgcaaagggaacgaaggaatagattgtggttcagaaatagattcaatttctattgcgaagaattctttcttaggaagacaatctcatcttatttgatgaggtttcttttttttttttttttttttttgagacagagtctcgctctgttgcccagtccagagtgcagtggtgcaatcttggctcactgcaacctccgcctccagggttcaagtgattctcctgcctcagcctcccgagtagctgagactacaggcacatgccaccatgcccagttaatttttgtatttttagcagagatggagtttcaccatattggccaggctggtctcaaactcctgacctgaggtgatctgcccactctctgctgtgattttttggaaggtgctttttctttctaaaagttcctgaactctattatatttaaaacttgattaaggtatttttggggaggacagaattgcactacaaaaggttactattactagacatttcagtaattgaactattaaaaggcatgaataattttcttttattttagcaaataaagcatttaggcatggagtaaaagtgcaaaaggaaatagtccgaatggttttaagattaattaggagacagtgatagacttagctgactaaatttcatggaatgtaagcattcttttttggagtattacatactgaattatccaaaatcccagaataaactacatttctattacaggaaacaccaataaatgtgttcccatttattttattttttaactttagacattttgttattggtgagaatatttatctctgcttgatttcatgattatgcttttgttacacacacagaaaaactttaccagtttttaaataggattctactcttgctatgtaaagtatttgtcactttaggcattgctttctattttctggaattagattttgccatgtttctattatactacctttattgtatttattcctataaaaactcaagcatatgttctatatccatgtcaaaataagtctaaatcttttttttttttttttttttttgagacagagtctcgctctgtccctcaggctggagtgcagtggcgcgatctcggctcactgaaagctctgcctcccgggttcacgccattctcctgcctcagcctcccgagtagcggggactacaggcgcccgccacaacacccggctaataagtctaaatcttgaaagaaggaaatatatggagtgctttaaatttttaacactttcaatatgaatagaattgggagcaatgcagtgaaagctgtaatacagttgctattactctctagaaagtcagtgtagttgagcagtcagactatatacaaaaaaagaaaaattgatgattacctcatatgttcaacaaaccgatttgatattgattaacctgtatacttaaaacagaagcaatgtggatatgtacggatagaagaagagcttgaaaactgcagagtaatgcaccgagggtggaaagaaaatgctgtagactaaaccagtgagtgctgtactaagaggtgcaacatctttcaaattaagagtgggggccatctagtgtgtcatcacacttatttaattggaatcatgattaaaaagaagtttctagcataaactagactagattaatacaaaaatagtgcattacaaattgaaaaggtatggaccatttcagaaagactttgtttccatatataaaaataaactgtgtatgtaaaatagatcatgtacatttacgtgcatatataagatacatttatgtgtatatgtatataggtgcacttgggttgtggtataaaatatattttttacagtattcagtgacaaaaatgttgatagccactgaggtgttgaatatagactactcttttcaatgagaacagaaaaagaaagttaaagtaatttcctggggttttgtgaaacctgaaaactagtttccctaacaccataatacttaatttgtctactattactaaaagacaatttcatttcctgtgacaccttgtaactggaaatggactaaacattacaaataactaatctcccatgagtcaatgtaaattatagtaataaaattgtaaatgaacattaaaagaaatatataactctctgcaaaactgcttctgatcctgctgtctcactctttttggacaatctatgctttattgttgtacatatacttcattttggaagcattttttaaagagaaatatctcttattccaatcttcctacatactatcattcaaaagcctttcccatttctcatcctccaggaaacttttcattattaacccaatatggtatgataatttctctgtgtgtatccatctttattccttgctgtcctaatcttaaaataaagagattctatcatttaatctctaatatatgggggcatttatagaggaaggcaaaataattcttatatataactttgatgtaattaagtgatattatgtggagtgttggtgtgtgtgtgtgtgtgtgtgtgtgtgtgtatgtgtggtgtgtatgtgtgctgtaaatcttaggtagttacatgtctctttagttaaatgttactttatatacgatttgtatttcttttcagttttgtatttcttagtggagaggggtaaactttaacagtcttttcccaggagagtgcaatgaatttatgagagcttaagtacttttagattatggtaatgataataatggtgctaactttgtcttcaagaaacagactatttcttcaatcagctccatgcctatttcagtaatctgtacttcatatctttttcagcatgaattatttaaaaatctgtgaacttgcctctgcttatctttctgtattctggattttacttatttatttgtaggtgctaatattactctttcagggagccaagagagatctcaagacagaatgtcttgtgtgtgtttcaaagatggcatgaattactaacgttcccttcaagtttagaatattcttattgttggacgtttatggcattaagtagaagaaaatatatttttgcaagaaaaatgaattaaattatattttagagagggaaagatcagaaggaaggtaataagcaaggttgtaaatcaatgtcagagatggaagaattgtaatcaatgaacagaaataatattgtacagattacactacacctgtcgctctgtcaccaactgttttgttcttaaatcagtggacagttttataaattttcttgatccttgtcaaaactagatttaaatttatcaaatttcatttattcacagaaccagatcttagatttatgtcatgtttggtcctgattcattaatttctgctattatctcaatagatttaaatccactgttttcctgatgttttttctttttgtaatttctatgactatatataaaattatagttttataatttctgtttttaaatacttgttttatattattacttttctttacatctggaatttcaacaagaagttgcaagttgccactgtgtttgtgtgtcttaaatagtgagacttcgtttttgtgaatgtattaaataaattttggctttaggatcaggaccctgtgctcaaaccctggctcttccatgatgtagctttgtgactttgggtaagttactcaacctctctgagcttcagtgtcctcttctgcaaaacagaaaaaaaaattggaaatatctgtttctgactggtgtcaaaaagttaaaggagataaacgtgtaacacattcccctgatgcatagcatgaagagtcaatgagtattatggacttgtgaataaatatttatgtgtgacataccttatgtgttttttattacatagtcaatcacctattctatgtcatataatacatactgtaggttccagatgaacccctccctgtctctattgtgtagaaacaaccctatttctccccttgataattaagataaatcactccagtgtttttgtggtggcaaaagtagtccaaaatggccaggtcacagtctcggcttccagttcaatggaaccattgttttgtctagttatacaagcattaatcctttaggaaacaagatcttcatatgagcagaacctaatgtttcagatacagaaagcacaaagtgttcagattatttattcatttctacttcaacccttttttcctgaacctgacttacctctgggagaatcagccatagatagcagaactggttcacggcatgcattgcctcttgtaggcgagcaccctgccctgatcaatgcagccattgaatcttcaataagacattcaattgcaatattaggcacgttgctttgcagtaaggagattcatgatacaaccatgaatctcatggggtcaggccagtgcatccctgatttcttctgtaaaaggaattcctcaaatgggtggtgacgctgacacaggaatctaaacagagaagacaaatccagatacagaataaatatgcatattctattgagcacaaatatcaactcattccatgatgggtacaattcaaaacaaccatactgaataaaggtggccaattggtcacctctgcatatggtgccctagcaaagacttggtgttagtgtctgctgttgcaaggttaggcattcagtagtaaaaatagtcaaatcagccatgacgaaggtgagtttaatttgctagctcatgcataacctccatcctggctgcgacagccacttattcaggattcctttgggcaaacactgtggtggctgaaaaagactggctaatgttcacagactattaacagtcctggcttttacatagaggattcatttaaagcaaaaacacatgcacactcagatatagtggatttggtttcagaccaccacaataaaggaaatgtcacaattaagtgagtcacacaagatttttggcttgccaatgcatataaaacttatatttatactatattgtagtctattaagtgtgaaatggctttttgtctaaaaaactggacataccttaaaaaatacattattgataaaaaacactaatgatcatttgagaattaagaattcataaattctcaatcttaagaattaaggattcatcattatgaataattcatattcattcataattcataaaagcatttgtgtaaaaaattggacataccttaaaaatacattattgataaaaaatactaatgatcatttgagaattaaggattcataatctttttgctggtggaaggccttgcctcaatgttcatggctgattctgctgactgatcaggatggtcattgctgaaggctgaagtggctgtgccaatttcttaaaataaggcaacaatgaagtttgcctcattgattgactcttccttccacgaaagatctctttgcagtgttcaatactgtttgttagcacttcatccacggtagaacttgtttccaaattgcagtcaatcctctcaaaccctgctgctatttaacaactaagtttatgtaatacttaaaatcttttcttatcatttcaacaatgttcacaccatcttcaccagaagtaaattccacctgaagaaaccactttatttgcttatctgtaagaagcaactcctcatccattcaacttttatcatgagattgcagcaattcagtcacatcttcaggctccacccctgatgctaattctcttgctatttctacatctgcagttacttcctccactaaaatcttaaacccctcaaagttatctacaagagttggagtcaacttctttaaaattcctgttaatgttgattttttttttacctcctcccatgaatcataagtgttcttaatggcacctatagtggtgaatcttttccagaagttttcaatttactttgcccagaaccattagaggaatcactatctatggcagctataaccttacaaaatatgtctcttaaataatacaacattaaaatcaaagttacttgtcaatcagtgggttacagaatggatggtgtgtttgcaggcataaaaagacattaatccccttatgcatcttcatcagagttcttgtgtgaccaggtccattgtcaatgagcagtaatattttgaaaggaatcttttttgtttttttgagcaatacttctcaatggtaaccttgaaatcttcagtaaaccatgctgtgaagagatgtaccatcatcccggctttgttgatccatttgtagagcatgggcagagtcgatttaacattaattcttaagaccttgggatgttttgaaaggtaaatgcacattggtttcaccttaaagtcactagctgcattagcccctaacaagagagccagtttgtcctttgaagctttgaagccaggcttgacttttcttctagctatgaaagtcctagatggcattttcttccagtacagctgcttcatctacatggtaaatctattgttcaatgtagccattcaattcatgaatgatgttggctagatcttctgtataatttgctgcagcttatctatcagcccttgctacttcatcttgcacttttatgttacggagatcatttccttaatcctcatgaactaatctctgctaccttccaactcttcttgtgcaacttcctgaccactctcagccttcatagaattcaagagttagggccttgttctgcattaggctttggcttaagggaatgttgtggctggtttgatattctatctagaccatcaaatctttctccatatcagcaataaagctgtatattcactggtgtagcacattcattttccttcaagaacttttcccttgcactcacagcttagctaactgtttggcacaagaggtctagctttcagcctatttcagcttttgacatgtctttctcactaagcttaatcatttttagcctctgatttaaagtgagatatgtacaactcttcctttcacttgaacacttagaggccattgtaagtttatttatcaggctaatatcaatactgtgtgtctgaaggaataagcaggcctgagcagagggagagagatgggagaatggctgagcagtggagcattgagaacacatacaatatttattgattgagtctgctgtcttatatgggctcagtgtgtggtaccccaaagcaattcaatagtaatatcaaagatgcctgattacagatcaccattaaatataaaataattatttaaaagtttgaaatactgtgagaattaccaaaatatgacacagagacagaaagtgagcacacgctgtttgaaaagtagtgctgatatacttgtgggagcagaacttcaatttgtaaactatgcaatatctctgaagctcaacaagatgatgaataataaattgggatgtgcctgtatgcaaactttgcacccactttaaacagtttattcacagacctccatgtcatcaattctctcatctttttattcctaagagatcgtaagaaaaattattagcccaggaatgagggtagagaaatcgtaatccctcttttactccatgaaatgtgaataaagagattactggagcattgcccattggaggattttccactctcgctaaccttcaggggctgaaatagtacaacaacagtccacttctgtttgatattaatattcagcctacatttttttcttcagtcaacttgtcataagaaattaccaatgaggtatttgtttaggatggtgagaaagtgaaatgcggtttgagtggagtagttgccatgaaaatatgaagcacctactcatgtagctctacttttgcttccaaaacttgcttgaacccaattttgcatgaaatatttcactttgataataacgtgctgctttatactctcaaccacttggaaagtcaggcaacaattcatgtttataagattgtcaatttcaaccaggaatgagtagcaagccagaggctttctcaaggaaattagctcttttcagaagtaagcatggcacttgcttttgtgcattggtcttatcaaggcttgtcagaagccccatacaaccaacctatatgccacagatactttgagcaccatggtgtctactgggtcattaagtcaagttgcaaagtggcatgtaactgtggtcttttcttgctctgggcccatccaaaactggtggccttataggtacttagtaattgggttggagcagcaaactcacttgctttatatgttgcttccaaaatacacagatacccaccaaacctaatgtcttttctcttggtgggaagagttacaagatacaatatatataacaatatatctttatgtttgaagttaacatcttaatatatccaggacagtggacctctagacactttcctaagatgggtggctcattaatattcacggagatatacctcccactctttggtatgcatgtatcttaccaggacatctaagatatttgctacttcctgttcagtaggactaaatatgatggtcaatgtggtattgtaagaacatctactaattattttgtgctctaggttatgacataacaagatcatgtagccctaagtaaggacagagaaggtatggtactctttctgccacatgaaaataaactgatccaattgtctttggtaatcagcatgtagaagaaaaaaggctcttagtgatctatagctgcaagccatgagctctgtggatttcattccataatgagatcacatctgaaacaacagttgcagttgaagctaccacttgaaatgtctacaataaatcattgttattttccaagataaatctgtcttccacacagaataaataggtgggttcaataaagattaactaaaggaatcactacccctacattcttctggtctttggtaaaagcagtgccctttaccattccctcaggaatgcagtattacttttgattgattatttggaagggaagccaattccagggcttcctgttcacttttcctaccaccatagccctcaatccacattcagagaaccaaggtggggattttgcaagttgaagaatatgtctctgccaaactgcaaatttgaaaactagcagaaggttgactctcagactaaatgggcctacagtgaaacatttgggtgaaacatttattacctgaatgtttactactatgtattgggagcgtttccagtaggcctttcctttaactagtggagcactatgatattttggatccccagatattaactttatcttagaaccagttttcagtgtttctctttccctggtgcctagtcaccatggtagaatggctacaggtccccttcagggagattagagggagattcacagctcatacttgtgcttttgcatggcctttcctcaataatattcatcctccccttcaagtggcttcagatctgtgaaatggcatgggtctggaaactgatttaggggcaactgcagtgacacatatctggtctgtttaaaaacctagagttacgtgtatttattttagagatccagtgagatttctgtaggcttcccatcaatctaattgacatcagcagttagctgcctctaaagatctctacaggttacattgttctggttattgctccaactttcatgcctattccagaatcagaggccaccttatatctagagattaagtgctgacacttagcctctgtcgctctcagattccacttttccccaataaaatcaaggagtatgttttattgaatcatatctgccataattcctgacctgcaaagaaccactttagagctttccaagggcagtagagatcccttcccgacgatatgtcttagtgctgcagaaggaatatattctgggacttcttagggtgtatagcaggcattgggtgaacaagatccacataataaagctactacaacatttctatctccttttttcttttgacttctttggaatacacaaagttctggaatctcaagttcactaatataggacacagttgagtccagatgtctatcaaacaattaactattggaactactcttagctgcttgagcttactcattaaagaaagaacttctcataaatgtagtctgttaatatcttctgcctgatagaatgttagatgagttcctccccagtttaacacccttagaatccattcccaccagtattcctcaggtttgaattaaaataaattaaaaatacattgtgattattttggtattcatgctatctttcccttttactttcacatacattttaaaattgctacaaaatattttatatatttgtgaggtacatgtgagtatttattgcatgcatagaatgtgtaataatcaagtcagggtatttggggtattgattaccttgagtgtttatcatttctatgtattgggaacatttccagtgttatcttctagctactttgttatatataatacattgtttctaactgtagtcagcctactctaccaaagaatattggagattacttctatctaactcagtgtttgcacccagtaaccaacttctttttatcccccactcccacccacccacccttcacaccctctggtatctatcattctagactctatttccatgagatcaactattttagctccgacatgtgagtgagaacactgtatctgtctttctgtgcctggtttatttcacttaatataatgtcctccagttctatccatgttgctgcaaatagcataatttaattctttctctatttccaaatagaatagcattgtgcatatatgccatattttctttatccatttgtctgctgatagacacagattgatttaatatctttgctattgtgaatagtgctgcagtaagcacgtaagtgcaggtaaccctttgatgtatagatttcttttcctttggataaatacccagtagtaggattcctggatcatgtagtggttctatttttagttttaagaaatcttcatagtgtttttcatagtggctgcactagtttacattcccaacagtgtataaacgtttacttttctctccatccttgctagcatctgctatgttttgcctttttaataacagccattctaactggagtaaggtgatatcttattgtggttttgatttacatttccctgattagtgatgttgaacaatttttcatatacctgttggccatttgtatgttttcttttgagaaatatctattcctttgcctgctttttaatgggactttttaaattgttggtttgcttgagttccttgtatattctggatatgagtctcttgtcagatgaataatttgcaaatattttatcccactcaagaggtatctcttcactctgttgtttcctttgctctataaatgctttttagtttaatataatctgatttatctattttgttttagttgtctgtgcttttgaggtcttagccataaaatctttgctagactgatgtcttgaattatttcctctacgtttttccacagtggttttatagtttgggatcttaatgttttacacactttctagttgtttacatgcagcatgccgagatctaactctagttatgggtctagagacaacaagaagtagggaaatcacatttcaaagaataggataactgcctcaaatcaaaataataaaaggtttccaagagaaggaatctaatcctgagaccaaggaagccagccaatttcttctagacaggcacaacagaacccaaagcataaggataaacaaatcattctgaatccatccatattactcaagttcagttcttcaggacaactgtgtcctgattttcataaaggaaatctgataagactatgaattcaacttgcactgtaattatgtaagtaccaagataaaattaggtttgctttggtaaacaatgtccttggggcacaagggtgaagacattcttttttttttttgagacggagtctcactctgtcgcccaggctggagtgcggtgtcatgatctcggctcactgcagcctctgcctcccaggttcaagcaattctgctgcctcagcctcccgagtagctgggattataggtgcccaccaccatgccccgctaattttttttgtatttttagtagagatgggatttcaccgtgttagccaggatgatctccatctcctgacctcgtgatccacccgcctcggccaaccaaagtgctaggattacagacatgagccaccgcgcccagcagaagatattcttgtagggtagtcataggagttttctgatggacctagatctacttctagtagcgaatactgactacatcagccagcgtcgcataggagtacagaaactactccaaacatttcaggcaagaatgagtgtgatacagagaattagaggattacaaaactacagaaaagcctttgggtaggaaggactggaagtcattgcttatgttaaggaactcagatggtgcatgaatcaccaggaacaattgcggatgatctcttctgcctgaagcagcacaatggctggttcataggaggttcccagaagcagattagaaaggcagtgttcttttccagatactgtctagcatttcaaataatatgctttaaaggagttacttcaaccatgaaatgtctctgtttggctccctttaatggggtaatcaaaattattatatgctttcagaaacaagcacacatttattttgattaagtaaacaagaacactaaaataaaaagaatgcaaaacaaaaatccgaatacaatataaacattttcatttgtggcctatttttatttttcatttgttaactcttaccagtgttacatagactattacaaatgcttactctaatagtcaatgcttttctcattttcaccagcaacctaaaaaaataaaatgataaggattgtgagaaaattaattcaatatttaataaatgccaaattgatagtttttgataagaatgatcttcaaataaaaatacacatttgttcttatagatcaaagaagaatattttattttattttatattttattttattttactttattttattttatttttattttctggttaaaagagaaagaattttccttaaggtattttagcctcttaacccatgtcttgctcctcaccacagaatttgagttgcctcatcaaagtgattggttcatttttcatctgattggaaataattaccttaaaatttggaagtaaaaggcatttggtctctttatgcttgctccattcagaacagtgcaagagcctattgcagaaatagcaccagttctttacctctgcctgtatcctgccctttgctacatgacttctctatttttctccttaaaaaagcatttttccttgctttttgattttggggtctggcatatgacgtgttttggccaatggaatgttaacagatttgacaccatgtatttgttacatttagattaacaaaatggaaacaagctttgaaatctgctgtcaataatgtatttattaaaataatcaatacacatttggtaagctttaaaattaccagtggaccaatgccattccttgggttgctatttatttcaacaaagatcattcagttgcaggcttcaaggcagaacttctattagagtttcagagaaaatgctcccaaagtcttatcttaaaaaaattgtccctgaattttataaaacctgagtagtttaattaggatacgtctttttctcagatgttgatatgctgttctaattctttcaagtgcataattgtaaactacttaatttctattggatacattgaatagagtatcttacaatttattttttaatgccaatatttagaaaaatctagaaattctgtctcattgaaattaagacaacttttgaaagttaactaatgtttgtgagagaacacagtttatacatagtcatttagggaattataagcaaaatgtttacagaccactgaactggcctttcaccttggcctataggaccattagcttacttgtgatagaattcaaaacccagcaatagttaaatgcagattaggatcaactgcttttctacactcttatcataaagttaccatgaatgtgagtctcatggcacattctgctacacacagacaacaggaggtcatgtaatattttgtataaactcaatgaaaatccaagcttcctgtcttctttggtgcctcaaaaagatcttatttgaaagttgtacttcaagaaaacaaaacaagattccaatggaagactatggcccaccatccattgaagtaaaaaaactcaaaatcctcggagaactagtgaaagtgagaggaggtgccagctgggcttcctgggttgagtacgggctcagaaagctgtgaaactcactcatttcctgcatcgggacttacttcagtcctggatgaataatatggaagacatatgcttaaactattcctaacaccaggttttgtgcgtgttttcttccccaagaaagctataaacagcaaaaattttgctgtaagtttccctgtgtcttctctccctctctcccttccccctcccctgaaactaaagtaaaagaaatgttaactgcccatttttttgtgaccagtggaccttatctatactcccagttccaattccttgtgaacatactttgtaaagtcctgtaagatcctgtctcctttgccatgctcctgcaagatcataaggtaaataaaacctaagccgcaattctggttttcctcaagatctaagacatgtcacaaatggttaattgtctttgtttctcgctctggtaacttcttcctgctgcacgtatttcccaccttaaagagtttaaaaggcaatcgtataatctaactctggctacccgttcgggaccaggctgtggaatctttgtactttcactctgctcaataaagcctacagctttttcttgccctcggtccgtgtctctaccacttgccgcggtcagccgccacaccaattctttgacgtggctagacaagaacatgaggcgttacaaaaggatgaaagacattttaaggatcaagtattacgtaccacaaccaaagggtacaatgtccttgactcactaaactcttaatgccatttgtgcaaggatgagaaagatcgtgatactattaattttaccaatgaaaatccatttccaatatatatcaagcaacttagcaaatcctctagtgtaggaaataaaaatcattgaaatttttgtagtagataactcctggtgacttcctgattagaattctagctgaccagtgacagagtctgcattcccaattagggcaatcgatcctgttaacagcagcaagtccgacaggtctgcagcaaacttgattcttgcctcctcagaggaaagaattcggcaggggtacataaggcagagtgagagcccaaggcaagttttagagcaagagggaaagtttattagaaaattttagaggccgggcgccgtggctcacgcctattacaggcgccagcctttgggaagccaaggcgggcggatcacgaggtcaggaaatcgagaccatcctggctaacacggtgaaaccccgtctctactaaaaatacaaaaaaattagccgggcgtgctggcaggagcctgtagtcccaggtactcgggaggctaaggcaggagaatgccgtgaacccgggaggcagagcctgcagtgagccgagatcgcgccactgcactccagcctgggcgacagagggagactccctctcaaaaaaaaaagttttagagcagtaatgaaaggaagtaaaatacacttggaagagagccaagtgggtgacttgagagatccaagtgcgctgtttggcccttgacttggggttttatacattggcatagttggaggtttccatttctcctcccttgatttttcccttgggttggactgtcctcatgcatggaggccagccagcacttgggaggggccgcatgcagtgtgtttattgaagttgtgtggatgctcgcttgaggtgtttttcccttaccagttgagcattcctagaggaaggtcatatactggttaaactctgccattttgcctcttaatgtgcatgcttgagcctgctcacctagctcctgagatcttatagagaagctgctgatcaccagcttcaggtgttttctctctactgggagactacctttctctggtgccggtcgcaaccaattactattttagagagacagtttaacaacctcctgaccgtcacctgatggtcctgacattccttgggggtggggagcctctcttcccctgctcatgtccctctaactacctattgcaacaatcccatcaaggttacaaatcaaactgacatatacatgaattaatactttctgtgccgaagtgtgtttaacgtaattacatacatcataagtcactggatatatgagtatgtaattaaatactatcagattgttttccaaaatgactctacctgttagtatttgcaccagcagagtatcagaacgtctaaattccacgatcttggcaacacttgctgttatccaaattagtcattttttaacattcttttgaattttaatttgcatatttccaaataatagtaaatttgagtatttttttcagaccatattttcaaaaactgtatgggccaattgggcttcccttctgtgaattgcatgatcatacgccttgttcatatatctgctgggcttcctgtctctgccttgttgatttatactcacaaataaatattgcatgctaattagatccttcacctttcaacaaacagagattctttcaggttatatttaggaggtttattggaaaaaagtacatataaaaatagggaaggcaaacatctctggagtacaactggggatccaggaacagtgaagccttgattagaatctatttttacaactggaaagctccaaatagagatccaaatagctctggagacagattacgtattaatagtgctccacccatatcccttaggggttgtattatttgcttgttttttaatttgtttgtcacctcctttgacattttccacatctaatagccagaatttgcaaacatttttcagtaggctttggactactggatcttttctttgctcgtgttctggaatccctaaatccctagaaaattatgttccttcaagacagtcctttaaaaaatgaccaactggcctgaggttagaagaaccttaactctcttgcctcccatcagataactctgagacccgatttacattcctgaattccctgccagagcagtctgaagctgggtgaccaactcatcccagtatgcccccaacgtttccacttttagcactgaaattctcatgtcctggaaccccttcagacccatgcaaacctacttgatgctttgcctgagttcatattatttttttttaatttttttagtatttattgatcattcttgggtgtttcttggagagggggatttggcagggtcataggacaatagtggagggaaggtcagcagataaacatgtgaacaaaggtctctggttttcctatgcagagggccctgccaccttccgcagtgtttgtgtccctgggtacttgagattagggagtggtgatgactcttaacgagtatgctgccttcaagcatctgtttaacaaagcacatcttgcaccactcttaatccatttaacccttagtggacacagcacatgtttcagagagcacggggttgggggtaaggttacagattaacagcatcccaaggcagaagaatttttcttagtacagaacaaaatggagtctcctatgtctacttctttctacacagacacggtaacaatccgatctctctttcttttccccacatttcccccttttctattcgacaaaaccaccatcatcatcatggcccgttctcaatgagctgttgggtacacctcccagacagggtggtggccaggcagaggggctcctcacctcccagacagggcggcggccgggcgggggctgcccccaacctcccggacggggctgagttcatattattatcttcctctccactgtcctgctttccttaccccttattagtgtctattaggactgattccttaataaatgatttgcacacaaagttgtttcagagtctgcttctggggaaactgacctaagatattcacttaactactgttttctgatccgtattctaacgccctattttattaagtttcagctagcattttgtgatattttggctcctattcttgctacctacaacatgtatcttcaaggtttaatttcttacttccatagagacaatgatgacctgactggtccagttagtagcatgatcctcttgggcaaaatttaggcaccaaattcaaaggtagcccatcagcctgtagattgtcaattcttgggttagataatcaggcttgctgcaattagctgtggccaagaagggtgagaataagtggtctctagcttggctgtcagcataacaatcccttagaagggagctgcaggatatgggcacacaggcattaaaaggcttgtagcctatttagcacatgctatttgtcttaaaatagcttttattttaaaaaattaaaacaaacaaaggactttattttattaaatgcttaatttcttgcaaattcagaagtcttatgctgtgttacccgagaaacattttctgtaaaattaatacaatagaaatcagctaaaaggcaaagtaaaaagtagtggcacaggacaaatgttttgaaaaacctcattgtcttactgtgccaaaagagaaaatattaaaggaatttagaagtagcaaaatttgtagtaatgccatttcattcattaatgcatatagtaacatcaataaggcacgtagatccgtataatgtacagcttatgaatacgtaagcatgaaaggttttatctttttgcataatactagatgattccacttaaaacatttttggttttgatgtgagattttgcaggcatgaggcttgattttcttttcaagctctgcaatttgtttgaacttatttacataaggaacaccaaattagcttgttatactaagagtcattcaagtatgtccaatttgcattcccgtatttgaatcccacacattcaatttaattttctttccattgctttttctggctttcttaaaatgattaaggatgatatacttatttttggatgcttcatagctgtacttcccaggaaatttgcctaattcagaagattttattatcttttattttaaacccactttcacttcaggaggatggcagaggttctgaaaattcaagcatctctaaagattttgcatctattgcaaagattcttgcttgtaggggcaacaaagattcttgcttataggggcaattattacagtgtctattcttttaacatgggattgtgtctgtatctgttgtatggacattgaaggtacttttaatccaagagatttttgatacatttttccttttgtttaaacattaagatgattcctggatttcctttcatattcttctgcaggcagcctttatattgtcaggaaatgtcattttactttacttgatgagaacttcttcgatgcttcctgttctctgtaaaaatactagcagccttcagcctgagaacaacaggcttctttctgttctttgaagcattacttgaccaaaagaaagtttagatcagattacagtgtgccttgagactctttgtagcttttggtctatatcttttcaaataaccatggctttcactttattgaaaatcttcaaccttttaattaaaatgactagtacacaatataaaaatcaaatacaactaaagaacttacaataactggcaatgattcccttggtctctcaatccaacacttttggcacccagtctttctaaaggcaataaataacgtttaattgagtgtgggagttcagtcaggctagtgggaaacattttaaagatagttacaaaaaataggcacaaaccttcttggaaggccgggggtttgcataagctccagtaataaatctggctgaaggcagcctaatccttaccttgagtaaataacttagaggaggtacacaggaatgtaagggagcttatctaaatagcttgtttactcctaagaccaacctttgattaccccgggtgcataatcgctctctatgcgggaggtcagctatgtcaattaccctctagtggtgtttactcaagacctttgtcatttaatctctactaaataaatgcgagctttgctggctgagaggcgcaggggctgcaactctttacgcaccctccttggtgtctgtaagtggcccagaccctcagcgggactgacaggcaaaatatccgtgtcagtatacgttattcatccatcgttgggtcagagtctgcaggacagaccccagcaattgagggtttagttgtaatgactttttgtaaaaatcatctttaatataattcagctaccatattttaaaatataattttaaaatctttttttactttctgttatgacagatatgattgagcctgctcatttcctgccaccagtttcccttttttgatataattacatcatttttggattcttcaactggtttccttaaattaaaaaaaaaaaaaagaaaagaaaatcaacatctctctcagtctctttcccctctctctgtttcccactctctttctctttgtggaaacatagatgttatattgtcttaagccaaaagggaagacataaaaatagtttgtttacccaagtgtaataacaaggcctccagtaagatttagatgatttctgctaagatttataatactgcaatctttagcagctaattgttataggcagtactccagacacctctgtttcacttcctatctccagatttttgaggttgatgaataatatttataataacaataataacaactgttgttgtagtacaacaacagacactgagtgtttagtgttaggcattgttacaaattcctgttacacattttaaaatccttaccactgtctttaaggtgttactatgcccatttaacagataaggaatcagaagcacagtgaaattacgttatttatctgttctggttactactgctgcaaaataaaacaccccaatacttaagaactattgattatgctcatgtattatatgagtcagaagtttgaacagtgtccagcagctatagcttgtctttcttctaagctatctggaatttatgatgggactaaccagagttgggggtggttatctgcaaggaatcatctgcaggtttttccactcacaaatctggcagttgatggttgcttttggttgtaatctcagttggggctgtcaactagaacacctacaggtgccctctgtgtgtgatctggatttcctcacagcacagtagcccagagctgtcagatttctccatgttatctctggactacaaagaggggtgggggaaattgacccagttaataaggaggaagctgaattgccttttatgaactagcattgggagtcatgcaatattacttcttttgctttgtgctggttacaagcaggtcacaagcctgctgaaattcaaggataagattctagaagataaggtatttttatgtccatcttcagaaaatacattaaaatcatatgacttgcaagtgacattctgactccagagtgcacatattttctgtatattgtttcttaccaatgtagctacattttactgctgccactttttctgggacaggtctagatttgggggtgcatgtcttctacttctcaaaatgtattgctgagcttctctagtgtgtcaatcattgtattaattttcagcattgacaattgtaaacctaaatcataccctcctgcttcatgaggtaagtttttctcttatgaatataaaacttggctttatcttcttccatctcttggatttgttcacgcttttctatattctttctatgtctttcccttcttttgtgcattcttctatttctcttgaagcataacttttaagagcttcttaagagggagacatggtgtaaattttctttgtatgtaaaagtaagtcttacaaatcaattaaataacctacatttttatttttaaataacaaacaatattctttgggtgtttgaaggaattacatttatgtcttctgttatctcattttgctatcaagaaatgtaagttttgtttttgttgtgtttttttctggaaaattctagggctgatattcgtgcttctctgaaatttataagtagatgcattggagtggctataatttcattatttgctgtaaacatctggtctcctttcaatgagagattaagtcctccagtactgaaaaattttcttcagttatatttttgataatttcctatttcatgtttccttatttctttgtagaatcttctttatttagaagttgaacatcatggatcaatcttttagctctttttcccccacttatatattctccagttacttgcttttttgttttatttccctaagacacctaaaatctctttctgccagccaacccttctgcttatttttgcttacttctgctactcttattaattaactgctaagtcttttttatatctgtatgagatcactaattagcattttacatgtttctcttttgtttctggttctattgctgttttctataggtttttggatgttgttttatttcttgaaagttggaattattcttcaaatgtttagaactggtgattggctctgctcagaagtaaaatacttctgattgaaaactctttgagcttgggagtgttgggagggttgtgattgacagagtttatctataatattttagacagtttgccagatatcctatttgggaaactcccaactgatgcattgtaaaatgctccaatcatttatctgggaggacactaccggtctgtgtgtgtgtgtgtgtgtgttgtgtatgtgtggtaagtatttgtcatggagacatttacagtaacagtcaaaatttatcattattttttaaatatttatttatttaattcaaattgatgtgcattgatcattattttcataggaggaataaatgctataactatgtaagcttacaattaaattttatttaaagctgccaaaaattaaatttatttaatttttaatttagaggcatataaaatttgtgtcattgttttctgattttttagctggaagagacaaaaaaagtgaggtgagattattttcttactactttctgttgaagaatttgatctcaaaattgacatggtaatataagttcatgactaaaatctggacacatcaaggtgttaatattcaaattaaaacagttataagcttttctgataaaccaaaatattagtgagtgatattgatgactatgaatattcaattgagatttttttttctaagtgatcacaaaagcataagaaatttaaaaatggagagcattaataaaaattaggttgcaggtcaaaattttgcattgtggaaaacataatatatatttatgtggtttacaactatgatcttcttgattcagtctaaccacagggaggaaaccctcccctttataacattaacttaaggccagttagaataaatgtgccatcattgtcattgtctttaatcattgtttaccgagcatttccgtaatatataccattggcttcagttcaagaaatcctggttcctgtcattggatagcttttgacctatattaaagaaatgtattacacaggagcaggataagtatgcagcatatcgtaggggacagatattgctaaagcttgttggttatgatttgctatggtcttgcctatcacagtaatgttcaatgcctttgacatatgagaaggtaggattttagcagaataaatattttgtgctatttcagatgtgggaaggatactttggatgacattttggagccataaaaaagtctaggcagcaggtagcaaggacattaacttagctcaaacaacacatgtttacatatgattagtaaagtaaaatgaggctttgctacatttgacaggacagcctggaaaattaacctccaaaatgccctgaaggaagaacagaaaacaggatgaaaaagcacagacagtgataattgtcatgcagatatgagttagagagacaaataccctaagccagcatctgagaaatgataataaaagacacattcgtttaaaaaattcactgaatgtccaactgtaattacagaaagaaggaaaccaaatgcaaaaacaggaggcagtacaatctcaacatctaatattttcaggccaaaggtttcagggaaaacatcagaaaataatttcaagttgaaagtggttgaaggcagagatgaggttgtgtaacatgcattgaaaggtctggcataagtttgcatgtatttttaataattggcatatccataaagaaattctactgagaggtaccactggcagagttggtatgaactcaaagaatggagctaaacagccttggttggaattcagcttcccagatttctcgtgtttgaccctgggcaaattgctttacttttgtgcacttcattatagtacctaactcagagggtacttgtggggattaaatgagtaaatatacacaaagtactagaacagcatctggttcatggcactagcagttagtataattacagttattattactaatgttgcatttttcccatgcactttaagacattttgaaacatttctcaataactattttttcttgtctttactttatttactcacttaatgtgtcaagaatacaactaggtgcctagctctggcaatatataagacagaagctatagaaaggttgtatttagttattgataagaagacataccagtagaacaaaatttttattttaaattgtataattttcaaggtctttcactactatccattcccctatgactcaggcctcatcaatgactatttatatgtacagcttttcaagtaggtttcttactacatacatacagaacaaaaaaggagagttaatgctcaacttcgaacttgaaaactttagcattgcacattaaaagcaaagtctaaaggatttgcaggatagattttaatcagcaaaccacaaagcagagaagaacacaggaggaagtaagaagtatactttttgttttcttttctcttttttttttgagatggagtcttgccctgttggccaggctggaatgcagtggcacaatgtcagctcactgccacctccgtctcccgggctcaagcaattctcctgcctcagcctccagcgtggctgcaattacaggcatgtgccaccactcccggctaatttttgtattgtcaatagagacggggtctcaccatgttggccaggctggtcttgaactcctgacctcaggtaatctgcccacctcggcctcccaaagtgctgggattacaggcgtgagccacctcgcctggctcagaaaagacctttttataataatgttgggaggtaggagtggagctgtgaggaagagaaagatgaaaaatagtttagagattactgtgggatgcttcctactgccctctactgaggccacatcctatgttctggaggaagaagatcgaacggcgtacactttctaggggaggaatcctagagtatagagtatttgtatctcattttccaggacatggtctaagagcactgcaaccctcttagagaagcccagaatggaaccagagtagggattagcaaggatggcaaggcaaggcaaaaaggagtctgaggtggcctcctgctctcccaaagcccagaatagtgtgggagagttttccaaagtctctagggctcccaaaagtgcccagaagtaagagggagtgagccacagaattgaaagtttctgttgttgaatatgccaactgaaaacaaaggagggcgtgtaggactgtgaacatcaggtaacccacgtcatggtgacaaaggccagttgcaagaactggctgacccatcacatcactgtggaagcctgtgagaacagaggagggtcacagaccaaagatgtcccacttctcttcatcccttccccatcttgattgctatggtgctctatagaagcccttcccacaaaagagaacgttggggaagaaatactgcattgattactgagaagttacaggaaagactgatttttaatctggaattgattttttctgaatttgcaaagttaaatgatgtgtgtttgtatattagtccgttttcacactgccataaagaaatacctgagactgggtaatttataaaggaaagaggtttaattgactcacagttccacatggcttgggagtccttaggaaacttatagtcatggtggaacgtgaaggttaagcaaggaccttcttcacatggtggcaggagagagaagtgcaagcaggggaaatgttagatgcttacgaagcaatcagactcgtgagaactccctcactatcacaagaacagcatgggggaaaccattcccatgatccagtcacctcccactcgttccttcctcaacacctggagattacagttcaggataagatttgagtggggacacaaagccaaaccatatcagtttgtttgttctgtttgctgctgactgaaaatggaaaaccataaatagtgcaaagttcagtgatagaaaatgacctatccagtgcatctgtagacatcaattttcacatgtagttatcaccctagatacacttacaaggaacacttcaacaacaaggcaaatagtatgattaagccccagaatcatcagtggagaaataagccctttagggaaagggaaagatgagtcagaatgagtaggaaaggcataaaggaggttgtaaggcattgagtggtgagttttaaataggcatagaagtgaggaaatggtgtcctaggtctgaattaagctgcacaggcaaggtatggaactaaactgtggaccttaccacaaatgaggaaaaacattaaaggatggattttttgctcaaaatatgattttatttcacaactctgtttattcagtttgctttgcagacaatgaccttcctattactcagaaactgtgatttttcatacaggtgaccaaaaccctctttcattgttctgtattagaaactagatttcaccacttactagctatgcaacattggacacacctaacttctttgacttaagactcatcattataaaatggggataatgagataattactacataggggtgttgtcatacaggataatctgtgcctggcacgtagcacacacgtgttatctattatcaatgtaatatttgttttaaaaaacttttctacccttgaggaaagtgatactaaatattctaggacatccaagtttctgagttcagtagaggacacaaaaaggactcaaggtctgggttaatgggggttatgtgaatagggattggagggctttctgcataactctggcaattataaaagacatttccttactttctctctattgttacaaataagcattttgtttgaatcttcactttcccagaagtttccttcctgggctcttgtccactctgagtatcttttgggaatgtttttttcagacaaggggctcttattgtatagaatatttcactcagttctctctaacagctgtgttttcagaagcctgttgaaaaacatgacaacaaaataagtctactttgactctttgtcattcgtacatttaaagttctttacattttagttattttaaaaaatttaagctagcagaatcttcaagagatttggaaactcattattaatccacagagacctgtgttggtttttccatccctttaccatcaacttgctactgttgtctggatcagagttcaattcaataaatagtaattctctgtttcttttcttctcttaatgatgacctatggataatgaatattgacatgtggatgacaaatgttgaatttgtttttgtgaaaaattctattggttctgctttcaacgtactattcaaatctgaccatttttcatctttttttttcactgcctccactctagtcccagtcacagtcatccctggcctgattattgcatcaccttcctagctgatttttctctttcaccctggtccagccatgctggcctccttgcattccctgattaggccaagtatgttgcttccttaggctctttacactccctttttcctcttggaaatacccttccttcacatagctacatgagctgcttcttcatttcttttatgtctcgttagttaatgacattttctgaataacgtctaccctgattcacttattgcaaattgcaataggcccctccccatagccactttcattcttcttatgatagtctttagtttttttatagaagtttcatcttcttacatgctacgtaatttatttattagatttattgttaatcatctgtctcccccagcaaaaatgctatctttctcttatttttttcctaaatatatcacaaaggcagagaccactaccagggataccataaaagctgagaaattgtgtacagaatgtatggaagaaaaatggatatcttctttattgaaaaagatatgaagaggtgattttagtttttcgacatgtaagctggttccttttttattatctcattgtggttgagagattacattgcttagttctatcttgggagtaaattatgtgctaaagttttaaaagttctacaagggtactgataactggttgctaatgtagtgatcacattcagatttgttatcactctctcaattttgggattcctccttcaacaccctcttttcacatggttaatgtgatcctatgtatgggttataatcaaacctgttccttccactcagatacaacattgcccttggtggtctgatgaagtttgcaaatctaatatgttctgaacattacagccagtgaatattaattaataactaatgaccaagccttaaagcaggcaaaagaaagagcagaatgtagttttgactaattgaatgtatgatgaattcaggaagaatcacgttataaagagaggaaagttttccttatttatcaagattctattttatgtgaattatagttctattgaatctcatttttcttttgctgcatataaaaatgattggagtctggacaacaaagtgagaccctgtctctataaaacaaaaacaaaacaacccccctgcccccctcaaaaaaaaaaccaattagctgggtggtggtgtgtgcctgcagtcccaagaacttgggaggctgaggcaggtggatggcttgagtccaggagctcgaggctgcagtgaactgtgattgcaccatagcactcctgcctgagtgacagagtgagatcttgtttgcaaaaacaaataataaatacaaaataaataaataataaaattatttgaaaatcaagtgtatattagacataggaatatttctttcatcttttttttttattttttatttttgtcagagtctcactctctcccaggccagagtgcagtggcatgatctcaacttccacctcccgggttcaagcaattctcctgcctcagcctccagagtagctaggattacaggcatgcacaaccactcccagctaatttttgtgtttttaatagagatggggtttcaccacgttgaccaggctggtctcgaactcttgacctcagatgatccgcctgcctcggcctcccaaagtgctgggattacaagcatgagccaccgtgctcagcccggaatgtttctatgtgggaagcaaaaccattctttaaggttttccaaataagcataagtttgaaagaaggagagaataaccatttggtagaaattgtgaaatattaaaagtatgattgtgggtggatctgggagagatttagcccactgatccagaacatctttgaataaaccttccgtgtagaccaaaagtcttgaatgtttgccatgtgataatctttgcttcatctgggaaagatggatttggcaaactcttactgttgcttcttaggcatggtgtgcaaggcattgaaggttatgttccactgagaaaatatatgcaatttacaaagtaagaaaatggaagctcaaaataatctgggaattacttttttcctctttataaaaataattattcataataattacttattactttttttaaataaaagacgattgccacaaaatgccccaagaaagtaagataagttatagctgacgtcatcttatctaggttattaaaaaggctcaggaagtcgagtttccatctcactttgagagtgttaccaagtgttaccaatggtattctttttccttgaacaaatctctctcttttttttttcacctccctaaaaataagagtaatttagctggtcagaatttttaaattaaactgaggtctagtagaaaaagactgagaaatgtgtaaaagtaatatgtaattattgcatgatatgttttatgaatttgagtagaaatataggaataatcacatttccactgatttctatcttctggaactctaaatatttatttgaccactcatgaaaagattcagttaattagggactcgtaaaaagagaagagcatttttcctgattttggcaaagatttctaaatagcagcattattgtataagcacttgaataatgtggatgtatcataaattatacctgattgataatggatttttagtatatagtttactagactgaccaagaattacaagtggggagggtgagaaacaattatcttatattatatttagatcaatagagtcatatgttttttataatttaacatgtgatatattattttacaatttctactgttggtacctattatgtttaatcactacagtagggattatctcccaggaggcataccatgggttctaatcagaattgtggaagtcgtcaatgagaaatgaaacacattgcttcagtgaaattgtctaaaaaaaaaaaaattatattcaacataatagtctttgttttttttttttgagacggagtcttgctctgtcgcccaggctggagtgcagtggtgcagtctcagctcactgtaccctctgcctcccgggttcaagcgattctcctgcctcagcctgccaagtaaatgtgactgcaggcacgtggcaccacgtcaggctaatttttgtatttttagtagagacaaggtttcattatgttggccaggctggtctcggattcctgaccttgtgatccacccacctcggcctcccaaagtgctgtgattacaggcgtgagccaccgtgcccggacaacattatagtcttacatgttaagtgaaaaaaaatgttttttaatagtatgagctgtaaaaaagaaaaactagcttgattacagttgaggtagtggaaatatgcagaatgtaaatcatttggtaccagctatgtagttaataagattgatagcccatgtttattacttaccattttctttgtgggcatttaaagcatcatttttatagctagctcaattgtgtgtcacaagcatctgtcagaatataatcccaaatcctcataagtgtttacaatgccctacacactctggtcttgggctacttctactactactcttcccatttttgactctgttctagcttgttgcctttatatctgcagccccccacctaatatgttcttctcctggaatccccataggtagatgctaagaactgcattcagatctcgcctctgaagtcaccacatcagagatgcccatgttgccagactctatcccaacccttcccacccctctctattccattaccctacatcatttttctttaagcacttattacagtaggatattatatatttagtagtttatttgttttgtttaaaattttctgtgtctttcaacaaaaatagtaagaacagggtcattgttttgttgaatatatcaccagagcttagaataggtcctggtccatgacagacacttgacaattgatgaatgaatgaaatgagtaaatggggagacagctggtattaagggatgctttgaaatggacactgcaattctatcattcagcattcagattgtctcactctatcccttttcttttttcctttcactttattttttaaaacttttctttggatatctgaatatagcagttgaaacaaaacaaatcaaaaaacaaatcctctgaatattttatgaggcttatgataagtccaggcttatacgtattgccaaggatgacattcagtttaaccggtgtgattcacgtcaaaactgctgagcaacaccataatgtatccctcatatctgaatagtattttagttaaaaagaagcatatatctatctatctctctatctatatagatagagagagagatagatagatagatagataattttttaaggctagactttctccaaggttaattatttgttttacgtgtgtgtgtttggatatcttgaaatgtttaatctggaaccctcagcttgtgaacctcttttttaaaaaaacctgttgcttgttttgttttggtgaaaattactctaagaggagttttcctaatttaatacaaattttggtaaccaaagtaatttttagaaaatcagtttggaaaaattaaaggtaaaacctatctcagtttattcccaaatatgtgaatatatttatattttacccaaattcttccatttttatcaatattcagttgtaaggcttgtccctctgtgcttttgagaggtggagccggctgggcttctgggtggggtggggacttggagaaattttctgtctcctaaaggattgtaaacacaccaatcagcactttctgtctagctaaaggtttataaatgcaccaatcagcactctgtaaaaatgcaccggtcagtgctctgcatctagctaaaggtttgtaagtgcaccaatcagcactctgtaaaaacagaccagtcagcactctgtaaaaacagaccagtcagcactctgtaaaatggaccaatcagcaggatgtgggcagggacaaataagggaataaaagctggccacaggagccagcagcggcaacccgctggggtcctgttccgcgctgtgggagctttcttcttttgcgctgcataataaatcttgctgctgctcactcttagggtctgccctacctttatgaactgtaacactcactgcgaaggtctctggcttcactcctgaagtcagtgagaccatgaacccaccaggaggaacaaacaactctggacatacgactttcaagagctgtaacactcactacgaaggtctgcagcttcactcctgaagtcagtgggaccacgaacccaccggagggaataaactccagatacatctgaacatccgaaggaacaaactcccgacacacaatctttaagaactgtaacactcagcgcaagcccaccagaaggaaccaattctgggcacactttgggctatgaaaatataacagtgtaataagtttaatggcaaaagtgtgctatgtcttcaaatatacctagattgattatattaatattacaataagcaactaactcacatttattcctcaattgtttcctttttttttgagacagagtcttgctctgtcaatgaggctggagtgcagtggcgggatcttggctcactgcaacctctgcctcccgggtccaagtaattctcctgcctcagcctcccaggtagccaggaataaggcccgtgccaccacgtccagctaatttttgtatttttagtagagacaaggtttcaccatgttagacaggctggtctcaaactcctggcctcaggtgatctgcctgcttcagcctcccaaagtgctgtgattataggcgtgagccactgcacccgtcccctcaactgtttcctgattggagtgaaaatgaaatatttttaaatattaaaataatgttttcttttataattatcgttgctctgtgtttagatttttcttaaattttaaataacattaaagaagagcaagagtgtttttgttatactaaaatgttttgccaacaatttgaaagaaaataatttatccagcttgggcaacatggtgagacccccatctctacaaaaattaaaaaaattagccagatgtggtggtgcgtccttgtagtcctagctacttgagaggctgaggtgggaggatcaattgagccagggaggtcaagcctgcagtatgccgtgatcatgccactgtacttcagcctgtgtgacagggtgagaccctgcctcaaaaaagagaaggaaagaaagaaaaggagaaagaaagagcaagaaaaagaaaaaagaaaggagaaagaaaagaaaggagaaagaaaagaaagaagcaaggaaagagaaagaaagcaagaaaaagaaaggaagaaggaaggaaaataacttttacaaaagcattatttgtaaacttaaatttctcttttgtcacttgctattgagagtaaacagattctatttacagtagaaccccatatctagatagtctgagccagtatgtggtatgcagaaaaattagtcctcctctttctgggatcctctcctgagctcagtgctaattctttctgttgtcccttggaaaagggctacctaacacataatctgtacatgtgagacactgtcggcagctttgcccttcctctgccctggcagccatggcttttgccatggttctgggctgacacctctacagggctgatcctcaccacctatttgctccccacccatttgctgccttctttagattgagtccctccaggaattttctctcttacagaataactttttctgcttttctcccaccagctctcagattctttttccaccttggagctgttggacacagttatttcctttatcatttatctccttcccgtaccatccagatctgggaaaccggggtaaaagatgctgaggtgggacacgtatcaataaaagtgaggcagcaggctggatagggtgttggttaggatgggtaggtgttgtctaactttaaatctgaaacaaataacgcccacaatatccataccttgcatctcagactggccctttgtactgtgattttctcttcctccctccttccctctctcccttcctccttttaatatattctaggcatttatgtgccagcattatgaaaaacctttcagacaccttattacaacaagtgacccctaatcaaaacatatctacgttccagttttaacagtgttcccgttctattccctctatgcttactctgagttctaggggaaagcctctcattccctcaattaatatcaggaattcctatgttttctccttctgtcactccaaaaaaaaaaaaaaagtcttgagaacaagaaaacaaatcttccaaatgactcaggaaaagtttccgcgtatccgaaacacattgtgccttttatttcagtgacacagagtctgcacaatgcccacaaaccacctccagggggcagtgtggcccagtgctgctcctaggatgttaaacattcaaaacctcaggatggtttttgtggattggtttctctgtttggttaatgaaccatttctagggaaaaggtctctaaaggaaaacacagtttgtcattttatcattccctctttgtgctctttttctggcatatggtaaatagaaagacggccctgaggacatagcgtttaggactgaaagcagagagtactggattcagaggaaatgccttaattgggagatttgtgtccttgttgtcaggtctcactggggaggcaagaagaagaaagatatggattcctgacatttgttgagaggatggttggctttctcctcttagattttagagtgagtgtagagcttttcagagctcttaaaggttcttaagtgtatgagtatttgctgttagggcatttgcagaccctgacgaaaaggagcccagccagaggagaccaggatcgtgaactgcggtagacgaggctcgcccagcacagaaagatctaactccttgtgatataccccatggatattcaaacaatatggggtattattggactattatcataatatggatattttagatcacataatttgggttgatgctgtgttattttagactcctaaaattgcttttaaaaatgtatagatatagcacatgaaaaattgaagaggaaaatgactccttataatacaaagatttttataccatcagttaatctcactaaaggttaggttggcatttactaatattttttaaaaatatgtaagactaggaaatgtgaaagggcttgcaggctatggacatttttaccctatatgcatatttttaagtgccttctatgttgttgtaggagccgaaggaaagctttaccttcaacttctgaagatgtgttaaaagtcactgacaagagtcaaattaataacagaaaaggcatacaaatttaattgatcatagttttacataacacaggagccttcagaatgaagatccaaagatacagaggaattgtacattttaatgcttagggtcgacaaaatatggacagccatgtacaaatacgattgggcaaaaagagaatgatctactgccaatagagttgggaaacccagcaaggcctgtctgtctagactcctcttggcctcactgcgcagcattcgttcctccttggtgtgtggcaggaccctctatggaaagagggtgttatgacctacaattaaaaaaggtaggtcagttaatttctttatggcccatttttatacagaatggtgggtgatggttagaataatattttcaggttttaatggctggctccaggggaaaaggagctctggtttctatgacccaccttggaaagaaggaatctaggttttatggtgggcctgggggagaatggagaggccagagccatgagggtagcagaaggtcagagagagctgcttctaaggccatcattttggagtatcattttcagagaccctacaatgtgttctagtataagcttgaaaacagatcaacttaatttcctccatttcgaggaaaaggtttaaaatttgactgccttgaagttaaaagtattgaaagggcaagtcctatagattatggagtagaggcattgccctctgagtaagccacatatatgagcaacaccaattactaaaaacttgagaaagatttgcaaaattgctttgtcaatggaaggtaaagcttaaataaatacaactattttctccctttaccttaagagggtattgctagttgtgcaaccattaagttttgtgctctctcctcattgctcgtaccattctcattctgcctacctatgagacctgacttgtattttcatattaggataaactaattgatgcaaccaaaaacagattcactgtgaagctattgatggttaagctccagggtcctttccttgccaaggcctctttgagagctgggagatgctggaagttttaaggagttttaggtgggaagagtaagtcaagcaaccaacaagcatttttgcctaagaaatcatgctaattgccaatagagatatcagaagaaaagaacttaaattcctaaggtttctataatttattgagattttaaaaatcttattctaaagtaaattcacttttgtgaattttgtgtttgtaatttatattatttttcgtaaagaggatctcccaaactctataagcttaagattgacaaaatctgggttcttctctgactgcaacaagtaaatgcaaaaatatgggagagtgtaaacataatgaaaatgttttcttgctcacgtaatgcagtagtatcagtgaacgggctggtggggcagcccttcacacagtcattcaagactcaggataatgaacattctgtcattcttaataaggcttccaaggtaagtgtgggtcatcagcattctgggcaatcagaagaagaaacgcatgcaggggaggattttatgggccagctgaggacagatgcacttgacttcgttcacattccaccgagtcagtcatatggctgtaaccaaatgcaagtgaagaagggaaatgttacctagcagggtgctcaggaaggagaggtgaagatggatttggggtgagactctgcataggctctgcaacaactaaattcagttaaagatttttgtggtcaaggcatatagtttgtacagatgtgcctgttttgggaatataaataatttgctaaagcatgaaaaaaacttctgaaaaatatatatagaataagatttaaaatcttaatctaccactgtgtttatctagcataaatgaattcaatgaactcgcataaacaatgtggactaataattgactaaacagaaattatgcattctagactttagaatctaaagagattattcacagtgtagcaccacaaaacaggaagattcagggcattttaccctctttcagtaattgaggtcaggtgaatacctggaacaatagcagcactgtggatacttaatcatctacgtactattgaaccaaggaagaacactctgtgaaatggaaattaattgtgtaatatcttttaatatgtttgcttaaaatgaatgtgcaaatatcataaggcttgatggaacatatgatgatgaagtcatctcaaattacatggggaattagaatgcacagaaaatttactgagtagcaaagaaagtgattttcaaagtgaatgctaaaattcttaaaatgaaaactgtaaagcttaatttgcagactctttgagaatcaaattaattcaaatgtacatagatgaactttgttaattgtaaagtactatagaaatataaataatccttattgccattttaagtatattctaaatttttctttttgatctcctgcaaacctaaacagtatattatagatgtccaaaaatgtatttatttgcaaacactttttataacttgggaacttttttctgagataaacctctgaaatttttaatttttaatagtaaatatgatttgatgtgtgtttgctttatacctcactttccaggaaagtagctgatgtttaagaatagcataaattaagcttgagagccatattcacagttgaagtaaaaaaaaacacacacacattttttacctcaagatgattattctttcctttttaaaaactctcattaacagattctgctttgtacattgacctggtttccattttaacttgtatgcattttctactagataaaagtaagtaatcttgaagtgtttttattaccacaacctggaagaatgctcaaaattataaaagatgggcaagaatatgatattttaaataataaataatcagatacccaaagcagtaaatgtgttctaagaagcatcttattaatttcaaaactgttactaataattatatttatacagaagctaacacaatgctataaaaagaaattttgatcatatgtttcaaacactagctattgatctggttaaggtaatattacatggttagtgtagcttacagctgagtgtcaatacctgacccttttgctttcaaactgactttatctaaagcttcaaattctcatctataaaatgcaaatattaactagcaattttttaaggcttcagatgctaggacattttgtgaactagactaacactatcctgataattccagattattttttaggaagcttctatatatttaaaagtctatttggaatgtagttcagaaactactgcaactttttatatgaatatgaacagggattgaagcaaatatttttggtacaaaaatgagtgacacaaaatattatgaaataaaattctttatgttttgtataaagaccatcttagaggtcaaggaagtaatgggaaattcattaaataacaaatgtcaccaaataacacaaagtctctagatagcagtgtatgtaataaaggacaaaatgagtagttcagagagcaagtgctataagaatagtcagaaatcaatgtgggcttctttagctgggggaggctgcttggagcaagtgtttgtattggctttgacacaccaatatagcttgtttcagtacagagaagaggagcagcaaaaccatttcatgtgcaatgctcaaaaaaagaaaaaaagatctaaatgtcagaattattaattatttttaagataagtaaaagactcctcttctgtataccaatgagaagatataatatgtaaattgggacacacttgaatgccagacagagcagggtaagctttactccttaaagaaatgtggagttggacttctgcttccagaaaaatggagtagacatatttttcctgattccgcccattaagtaaaactgaaaacctgaaacatttatatataggtcaaacataagaccttaaaaggtggagagaaggaggcagacaagctagggaactgaagacccaaggaacagcatggtaatgagttccattgtttttttgtttttgtctcctcatatatcccccagacttggagctaaagcagctgtcaacctggaagtaccaatggacactgacaaaacaataaacaaatctccaacaaaagcctgttctctctagccaaaaatccaagacagtcttgagaagactagtaagacagaaaacttttagacaataacagctctactccagccagccacaacaacaataacaaaaaaactgtggctctaccccacccatggcaaaagccaagtggggaagccaagctttccactcatgcctgactgtgacaaggcactcacccttccttccagggtaacgtctgggaaagctgagtaaggaattggtagtttcattctcactgggtggtaaggagtccaccttactgttagcagagtccacatgactttagtagtgttggtagttgtggtggtattattagtagaggccatttagggagccatgacaaggcactcatatccatcgcagtcagtgagttaccagcagacacctcgtgtggagttggaagtcccaaccctagcagttggagacagactccctgctacaacttgagagtcaacagaggccaaataaggaacctggagacctgggcatttatcccacagaaacggaacttatacccacccaaaaggttacccaaaaatatgtgtagtagttttaattatagtagtcagtaactggaaacaatccagatgtccttcaaaaagtgaatggttaagcaaactgtggtacttccatttcttgggaaattactcagtaatttaaaaaaaattgttaatgcaacaacctagatgactattcagagatttgtgctgagtgaaaaaagcaatcccaaaaggttgtatcttgtaattccatttatgtatttttcctgaaatgacaaaactgcagaaatgtagaacaaattagtggctgccaggtgttaaggagaaggtgaagataagagaaaaatgtgtgcagctataaaagtgcaacatgagggatccttgtggtagtgaaactattcggtatcttgcttatatcaatgtcagcatgttacttgtgattttgtggtgtttgatttttttggcgttgttatagtttttccattggtggatattgggtgaatagcccatgagatatatctgtattatttcttccaactgcatgtgaatctacaattatctaaaaattaaaattttaattaaaaatggagctaattgggtgttttttctatttttcaaaaagtatcattataggtattgattagaagttagaacctggaggaggaccaaataggagaccaaaattaaattatcagccattagtcccttccatcttaggaaaataagctcattataagtatttaaatacttatttcattaatcatagtatttcataagaacagttgactggtgttagcaatgtagatttgtagagctgccacatcccaaggtatcactgtcttttaccaaaaagagctcaatcctcccccacgatgagatttcctgctatgtagtgctcaaagaccagtgaaatgggaacagtgattacaacacaaacatcatatttagatctagtccctagcatttctagtggcaggaacagaaatagaaaatggattattaggatgattttaccataaacatatttttaaccaacaggatatacttatattcatgccacaaactgaaaaacagattttcttttaacatgatagtcttgatctaatgttagaatatgtattccaagattgttaatgttggcctaataatgtatgaattaaaggaagagatgaggaaatatgtcagggagacttctgatatttcagatgcacaatgtatttcaaatataatttatattatatttaaataatttacacatataatttatacttgaaaaacagagccagttggttttctccttgcctttattagcaacatctattagatcattacataatacatgtagtggacacaaaagtgtgcaaaatgtcatatgatactttgataaaaacaggctaaacatatgtttaatttaccaaaactacacataagaacaatgactcgtgtgtacatagagttcatacagctttcaattttacttgatagcatcaagtggaacgtttatcatcagatgtaggacatgcaccttttcagctttgctattcaaaggggtcctcaagaagatcaaatcgagaatatagaaaaaaacaaaaatgaaatgaaagaaattatccatagcgctaataacttaagaaaaacagcactgaactttggcatgcttccttctccagtcactttccaaatgcaaatatctttgctttgtttcttaaatatactatggccattcatatgtatatgaatgacacaacaacagcattgtatgaatatatataacatattgtggtagatccagttccatcatcccttgcccatcttcaccttacttttgtgcagtaaggagtgaccttgttcctcaattctgattactcagatgtgaggagaaggctgctgaaggttatgggaaatccatagctaatttttctgattaatgatgttattagtgactgtgattttctgatattgtgtattgaatttggaagatctttataatttagcaagccaatatttttcaaataatcagtgtgtggtattacaaaacaaagcatgggaaaagattttttgaaagttcaagatatgacaatgaattttcatgtatcagaatacaaaaagttatagataaggtttcacattccatatagtagttaacttttaatgaaatataatttattgatttttggtgtagtatcaaaaataatatccgcagttgtctgaaagaaccattaaaatactcctccccttttcaactatattcatgagaggccaaattttcattatgtacttcaacaaaaataatacatcaaaacagattgaatgcagaagtagatatgagaatccagccattatctattaagcaggacagttatgaaatacaaaacagtgctactcttctcagatattatttgcttggaaacatgtagttacttttcctaaaatatagtatttatattaatcaaataggtttgttattattgttttaaaacaaactaataaatattcaaaaattctcagttttaatttctaacactctatatgtcattaataaaaaataaaaatggaggtcacagtgtagatatagcccaaagccaaccacctgttaccacatggccaaaacatcggtcattttgattccccaccaacactagctgtaagcgtcaacaaaacacaaaatcataaacataagctttatatccttgtcaacatgcatcagtgaaattagacaatcagctatagaaattagcttaaacagctccagctgccttaacaaaatgatgatgtgtaacaggcagtcacagaaaaggtcacatacttcctcctttatgtgtaaaaactatgttgtaactgctctgagtggggattcttaccaccttgggctgagttctcctggtttgtgaattgttcctttgtatgcacaataaacttttaccatttttctaacttcatgtagttttatatttgacattatggatatatcctacataaacagaagtctttgaggtccacaataatatttttaaatatacttttttagtgcaattttaggttcacagcaaaattgagtggaagatacagaaatattccatatattccctgtcctcagacatgcatagcctccccattaccaacatctgccatcagagtgatacatttgttcaactgatgaacctacatggacacatcattatcacccaaagtcagtttacattggggttcaccgttggtgttgtacattctatgggtttataattacatctattcaccattacagtatcatccagaacagtttcattgtcctaaaaatcctttgtgctctgtctcgtcatccctctctcctccctaatccctggcaacctctgatctttttactgtcaccataattttgtcttttccagaatgtcatatagttgaaatcatacagtaggtagccttttcagattggtttctttcgcttagtagtatgcattttagattcctccatgtcttttaatagccttttgtagcttatttcttttagctctgagtaatattctgttgtctggataaacacttttgcttgcataggcaaacaaaatgtaccactctggcttaatgtgggatggggtgttgagggggttggctaatgcatagttatctgggtcgcccaggaggtcaggcgaaaatagtactagaattattaggaggaggaggagaaaaattaaacctaaaatgtctttggtagtatggtaggggtggaaggtaatgttgtcagggtctgatgaaaaccctgaagggttattagatcctgtttcatgtaggaattaaaggtgaacagctgctagggctgtaatgatgaaggtaagatgaaatggaaagtgaagaatcatgtaagggtggctttgtcgactgagaacccacctcagatttattgcacaaggtcagttccaatatatcggatggctgatagtagatttgtaattactgtagcgcctcagaatgatatctggcctcatgggagcatgtagcctatgaatgctgttgccattgttttgagtaggaggatgatgccaatatttcaggtttctaggaatgtaaatgatctatagtataaacctcagccaatgtgtaagaagacgcagataaaaaatattgaactgccattagcatgaaaatagcgaacaattcagccgaagtttacatgtcggctgatatgagtgactgaagagaaggcagttgaggtgtctgatgtgtagtgcatggccaaaagcagtcctgtcctgtaatgatttggagggttaggcaggcaccaaaaagtgagccaaagtttcatgatatagaaaggttagatgatgtgggaagatcaatgaataattaatagtttttattagcaggtgtgttttgcatatattggccattagccttcttatagttgaaatactacaatgatttttcatgtcgttagtcatgattatagtccatgtgggaataatggcatatactatatttttattaagtgtcactttggttataggatttgtaggtttctcttcgaaaccttatcctatttacggaggtctagggctaattattagtggtgctgtgggttgaatttgttgaattttggtggtgctttcgtggggttgatgtttttttaattccccatttgtgtggtatgatgattgtttatggctataccacagcgatggctactgaggagtatcctgaaacatgagggtcaagtattgatatctgaggagccttattattaggactaataatggagttgatgctggttctgtgaatagttgagcatgatgcagtgaggatcatggttaattttaatagcataaagagctggacgatttttgagggtgagggggcagggttgttgcgtgaagattctgtgtatgtggctgccttgtacagttatgaatgctgattagtggtagttgctggttgatgattatttgttggtatttatgttctgattgaaattatcaggataatagattagataattaggagcagagttagaagggatgggataaaaaaagaaagtagagtttaattaggccgttctgagtagatatggtaatggaggctgaaatttgggttgtgtaatggtctttggtatagacttttctagtcatattaggtctagtagaagtgaagccagattttggcttgtgtataggcctgagtgggggtttgtatggtgaattgtggatgaataaaatcctagtatgttggagaagttgaatgtctgtaatgggtattttggtttaaggttattagtttcaagattaagctccattgctagtgagaagcctaagatggtcacacctagggctgtgagcttcaggtggagtggtatggttgtttttggggatgaagcaggaataatacggttggtgatgaggaatccggcgaatatgctgccaactgttaggcgcttaattgagttaattaggaaggggttattttcattaatagcagccagagtcatgaagcaaggttgtcctataagagcgaagaaaataatatgggtatcacggacagctgtcaaggaagtggcaataagagtaatagaaagggctcaggcgttggtgtatgaacgtgtttgcagtttcaatgatgaggccttagagtaaaagcttgtaaggaaaggcatgcctgtaagtgcaagactgccaataataaaggatgaggaagtgaggggcaaagtcttgaatagccctcctatttttcagatgtcttgttcatcattgaggctatggatgatgaaccctgaacatataaataatatagctttaacaaaggcatgggtgcagatgtgaaggaatgctaggtgtgactgattaatgccaattgtgactattataaggcctagctggcttgaggtgaagaatgctatgattttttggatatcattttgtgttagagcacagataactgtgaataaggtagtaatagcccccagacataatataaaggtttggattgataggttattttctattaaagggtagaagcggataagcaagaaaactcctgctgcaactgtagtgctggagtggagtagggctgagactggggctgggcctcctattgcagatggaagtcagagatggaggccaaattgagctgacttttctgctgctgctaagagaaggctaattaatggaaggagatggggatctggtctagaataaatgtttgttaaaattctcatgtgttggaggacaggaacaatgctatagctaaaataaagccaatatcactgatgcagttgtacaggactgtttagaggcctgctgtattagcatctgctctgccataccatcagctgattagtaagaaagacatgattcctacaccttcccatccgataaagagctgaaagaggttgttggcagtaaccagaattaatatcgtgatgaagaaaataagcacttgaaaaactgattaatgttagggtctgaatttatatatcatattgagaattctacaatagatcaggtaatgaatagcactactgggataaattttgtggagaagtagtctagtttgaagcttagtaagagtttgagagtctggatcatcattcaatgtcagtttgagataatggcttcttggtctgtgcatataaacgttgttgggatgaggctaacgatgaaggcatatgcgatagatgtttttacataatttgggtatgagcctattttgcaggagttgactaaggtaatagtaatcggtaggaattaaggggattagggctgttatagccatggaagatacatgtttgttacttttatttggagttacatcaatgtttttggttcctaagaccaatggataactccaatcctttaaaagttgagaaagccatgttgttaaacatgggggcatgagttagcagttcttgcatactttcttggtaggtaagaagttgcaggcttttattgttagatccacgatctaatgttttggttaaactatagctacagcatgcaaaccacataataattttagggtttaaggataataggaagataggtgcaagatgtataagtattaatgtgttttctcatgtaaaggaaggtttaatactgttaatataatatgcaagtgtccctcgtgttgtgattagcatatacagggagtaaagggctgtaattagtatattaagtcgtataagcataatagtgatatttgatcaggagaataaggccatagtcacaaagagttcttctactagattaatggtagggggtaaggcaaggctagtaagatttgctagaagtcatcaagaggctattagcgggagcagtgtttgaaggcctcaggtaagaaatatggtttggctatggacttgctcgtagtttgaatttgctaggcagaagagtaaggatgaagtgagtccatgagcaattataaggatgatcgcatctataaagcttcaaggggtctgaatgaggatagccataataacaagtgttatgtggcttatggagaagtaggcaataagtgattttagatctgtttgtcgtagacaaatagagtttgtcataactattcctcatagggacaacatgaggaaagggtaggctatatgttctgttgggggttgaggttaagagtaagccatattatacggtaaccgcctagctttaggagtactgctgcaagtactattgagttggcaataggggattctacatgggctctggggagtcataggtgaagtccatatagaggtatttttactatgaaggccatgatacatgctagtgatacaagattattggatcaggaggttaatagctcttggatagtaaatattattactagcatatttagtgaacctgaggtatttggagtataaacaaatgttacaaataaaggaagggatcctactagtgtgtaaaataagaagtgtgatcttgcattgaggcgttctggttggttgcctcagtgggtggtgataattagggtgggaactagtgtggcttcaaagaggatataaaatatgattagtctgtggcagtgaatgctatgattaaaaaagtctgtagagaaatcaatatcgaaatatagaattttttcatgggggtgattcattggacaggtggtattggcttgctagaattataagaggcagtagtcagactgttaagattagaaggggtgatgtcagcaggtcagaaaagattaatgagaagttggatgagttatcgttcaattggttaaaaaatagtaggctgataaggctgatgagcaggctgtggataaccatgttgattcagattatataatttttagagaatcatatcattggtaacagtataattgttggagtaataatttttagcattgaagtaaacttagattttgtatgtaatctaggccatatgtactggagattgaaactagtaaggcaaggcccactgcggcttctcaggcagcaaatactaagaggataatgggtattatggatgctagggtgaaatgtatatttaaagttataagagtatttatgatatatattgattgatgccttctaggcataatagggatgatattaggtgggattgatagagtaatactcctagcagtgatatggtgtatgctaatataataataatattaatagaggtcatttggtaaatgtggtctatcataatctaatgagtcaaaatcatttattttgacttaaactatttaccaattcaactcagtctaacacttttggggctcgttcataagtcaagcctaggattgaaatggtaactaatacaagggctgtgctgattattagtgtcaggttggttgtttgaagggctcatggcaggggtagtagtacagcaatctctaagtcgaagaggaggaatgtgatggctcctaagaagaatattatggaaaaggggaggtgggcagaggttattgggtgaaatccacattcataggagttggatttttctgtataaatattaagttgtgggagccaaactgcttttattagtagtaatagggccagtaaggtgttggttactagggctaatgtcaagttgattactctctttcggataatatcaaaactaattgattagaagtcaatggtactgcttatactaaaagagtaggatcctcatcagtagatagagacgtataagaatagtcatactacatctatgaagtgtccatatcaggcggcagcttcaaagccaaagtggtggttggatgtaaagtggaattttaattagcggaggaggcagatagtgagaaatgttgatccaataataacatgaagtccgtgaaagcctgtggctatgaaggatgttgagctgtagattccatcaaagatagtaaacggggcctcgaaatattctaagactagtagaagggtcaaacaaattcctaaggtaattgtgatggatagtgcttgaagtatctgctttctactactttctatcaggctgtggtgagcccaggtagttgaaactcctgatgcaagtaatacaggtgtattcaggagagggacttctaaggggttgaggggaaaaatgcctgttgggtgtcaatgtccccctagctctggagttggggctaggctagagtggtagaatgcccagaagaaaccagcaaaaaagaatacttctgagataacgaatagaattacgctatatcggaggcctttttggatgattgatgtgtgggggccttgaaatgtactttcttggataatgtcacgtcatcactggtatatatagtgtgttggttagtaggcctagggttaaaagggtgatagagttaaagtgaaatcacatggccaggccagatgttattaggagagctgagagagctcctgttagtggtcaggggctgggtttgactatatggtaggcacgtgtttggtgggacattacgtgttgtcgtataggtaaaggcttacaagtagtgcaaagacataggcctgaataagggctacggcgaattcaaggatgctcagtaggattagaataaagaaggccattgaagctgtgggaagactgatagtcgatagtactagtgtggctcctctgatataaatgcattagtaggtgtctggctgtaaggctggctgttaatcgcacagctaatgccattggttgaatgaataggctaatagtttcaatgatcactagcatagagataaatggtataggtgtgccttgtggtaaaaagtgagctaaagaggttttagtcttaaagcagaagcctataattactgcacctgctcataaggggattgctatacctagatttattgataattgggtagttggtgtaaattaatggggtagaggcccaaggagattggttgaggcaatgaagagaattaggaagatcagtataagggatcaggtttgtcctttaatgttatgggtaatattatttgttttagtacaagttgaattagtcaccgttgaatggaaatcagttggttactaattagatgactggaggttggaagtagtttggtgggaaataaaatgattaatactactgcgggtaggcctagaattgtcggggtagtaaaaggggtaaatagattttctttcattttaattctcagggagctttatgtttttgcattttgattatttttggtataggggatgtataatgaaatttaataattttaactgaataatggagaataaagttatggttattgacagaatgacaacggattatgtggaagtatctagttgaggcattcactgcagagaggtgtagatccgctcagtctttaacttaaaagtttaatgctagatagttttacagtgatattatagtgtggacatggatcaggtttcgaagcattttaagggggttaatcctaggacaataggtataacactgtggttggacccacagatttctgagcactgtccatagtaaaggcctggtcatgtagcagttagggtggtttgatttaggcatccagggattgcatctgttttcagccccaatgaggggatagttcatgagtgcaggatgtcttcagatgagattaatatatggatggggatatctattgggagaatagtttggttatcaactctgaggagttgaagttctcctggctttaagtctgctgttggaattatataagaatcgaagcctaattcttcatagtctgtacattcatagtttcaatattattggtggccaatggtggccaattgctttgactgtaagagcagggttgttaatttcatctgttatttacagaatacgtagggatgggagggcaattaaaattaagataatggcaagtaaaatagttcacacagtctggatttcttgggcatctatggtgctagtatgagttaattttgttgtgaatattagggaaataatgtataggactaggggactaattaggaaaataattataagagtgtggtcatggaaagtgagtagttcttccataataaggaatgtagtgtcttgaagtcctaattgaactgcatgagccattaagacatataggatttaacctataaactaactttgacaaagttatggaataattttactaatatcttatcgagagagtcgtggggttatctgactggcttgaaaccagtttctggagttttgattccttcctttctcatttaggttttcacacaggttggctcttcaaatgtgtggtaaggtggtggacagctgtaaagtcactctaaattagtaggtgattgcacaattgtacttttcattttgaagcaaaggcctctcagatcataatgattattagtataacagctgttagtgagataaatgagcctacggatgagataatatttcatgtggcgtacacatcagagtaattggagtaacgtcgaggcatacccgataggctgaggaagtgctgtggaaaaaaggttaagttaacacctatgaatataatggtgaagtggattttagcataggtctgattaaatgtataacctgaaaatagggggaatcagtggcaaagcctcctgtaatggcaaatattgctcctattgatagaaggtagtggaaatgggctacaacatagtatgtgttgtgtaagacaatatctagtgatgaattagctagtacaatatcggttaaacctcccactctgaaaaggaaaatgaatcctagggctcagaatattgcgggagatcatctgatgttaccacagtgcagggtagctaatcagctaaagaccttgatgccagtagggatggcaattattatggcagcggaggtgaagtatgctagtgtgtctatgtctgttcctactgtaaatatatggtgagcccatacgataaatccaaagatgccaattgatatcatggctcatactatgcccatgtacacaaatggttccttttttccagaataatatgttgcgatgtgggagattatcctgaagcctggtaggataaggatgcagacttcagggcgaccaaagaatcagaataaatgttggaacaagatggggtcaccccacaagcagggtcaaaagaagtagtgttgaggttatggtcagttaatagcatagcaatgccggcggctaggactgggagggaaaggagtagaaggactgccataatgaggactgatcagacgaaaagcggtgtttgatactgggatatggttgggggttttatgttaataattaataataaaattaatggcccctaaaatagaaaaaaacacctgctaagtggaacgagaagatggtcagagccacagaggcttctgcatgtgctaggtttcctgctaaagggggacaaactgtccaggtggttccagcactggcttctactattgaagactcaagtaggagtagaaaagttagggggaaaagccagaagctgatattatttattcaggggaatgccatgtcgagtcaaccaatagtcggagggactagccagttgccaaaaacccctatcatgatcggtgttaccataaagaaaattataacgaaatgcgtgggcggtaacaataacattgtagatctgatcatctcctaacagagttcctggttgacctagttctgctcgaattagaaggcttaaggccgtgcctactatcccggttcaggcgccatagcaggtatagtgttccgatatctttgtggttagttgaaaacaatcaacgattgatgaacataagtgggggaaaggtaaagtggctgaataagcattagactgtaaatctaaagacagaggtcaaggcctctttttagcagccctgaggtgatttctcatgttgaactgaaaattcaaaggagcagcttcaatcctgctggggcttctctgcctttctcccccaatggcggcgggagtagattgaagccagttgattagggtgtttagctgttaactaaattttattcgtggtttgaattccaccaatctcataagggcttagcttaattacagcggttgatttgcgttcaattgatgcagtatagagtcttgcagtgtttagatctgttacagaaattaagagtaacttacttactaagggctttgaaggttcttggtcttatttaacctaaatttctaagttatagttagtattaatggagagatgggtaagaggagggtagaagagatgacaagtggggggaagagtagtgtgggttttgtgttttcaaattgtcattttattttcatattgctagatgtggggaatagtgttactgataaggaatagactaggcatatataaaagtacaggttgagtaggttatgatagctataatgattgggttaataaggctattgttttttgtaaattcttgaatgatgattcatttagaaaggaaccctgttaatggggataaacctcctaaggatagtagaattagtggaattacaggtgtcaaccatgctcatttgtttcaggtgtgagatagtgatagggttctggtgcttatactctggctgagtgctagaaatgcggttgttgttaggataaagtaaataatcaggtttagggtggtaatgtttggattataaattagtactgctgttgttcaacctatgtgagtgactgaggagtaggctaggattttacacagttgtttgattaagtccccctcaaccacccactataatggataggattgtgacaggaggatgttcgtgtttgttgatgaaaagtttgaaacacagttgagataggagctagtttttgtcatgtgaggagaagtataccagacatcaaagagattccctgaattacctctgagactcagaagtgaaagggggctattcctagttttattactagggccactattattattaaggataaaaattgattgatagtgtattattgttcattgtccggagaacaggttattgggaaggatatctgttatgagaattatagatgtggttgcttgtgtaaggaaatatttggtggctgcttctgtagagcggggatttatttttttaattaagattggggtaagggctagtatgtttatttctagccctgttcagatgagaaatcagtgtgagcctagcattgtgataaaagttcctgtgaaaatggtgagggcaaaaataagttgaggtaagggattaattagtataggaaggatataaccaacatttttggtgtatgggcccaatagcttatttagctgaccttaatctaggacgtggtgtgataggtagcacagagaattttggattctcaggggtaggttaaattcctatagtactagaaattagaggattttaacctctattgtttactctatcaaagtaattcttttgtctgacatatttcctatgtttggggtgggatgctggaaattaggacaagcattgagatatatcatatgcaaaatgctagcgtaagtggtaggaagttttttcataaaagatgtatgagttggtcatagtggaatcgagggtatgccattcgaattcataaaaatagagtggttaaaagaagggtcttggtaatgaaatttgtggtgtagagttctggtgaatatatagtgtgtagtgctcctaggaaaatagtagtagttaaggcatttattatgataatattcatatattctgctataaagaagagggcaaatgacctgtggcgtattcgatgttgaaggctgagactaactctgactctccttctgctagatcaaaaggtgctcggttagtttctgctagtgtggagatgaatcatattatggctaggggccatgacggtaggagcagtcagaggaattcttgcattgtgatgagtgtgtataagttaaatgagctgcttatcagtagaactgatagcaggataatggctagggtgaccttatatgaaattgtctgggccacagctggtaatgcactgatcagtgcatattttgaattagatgctcattctgatcatagagtagacagcctggcttgatgttgctagtataaataggaggcctatattaaaattaattagacgatctggtataggcaggggagttcataaaaggagagcaatggaaagggctagtgttgaagcagtaacataaagggtaatagtggatgttgagggccataagggttctttggtgaaaagttttattccatcagcgaatggctgaagcagcccatagggacctacaattttgggtcctttgcatagttgtgtatagcctaagatttttcattcgatgagtgtaaggaatgctatagcaataagagtggggataataagtaggagaaggttaattatagccatattgttaagaagaggagttgaacctctgattataaaattttaagttttatgcaattaccaggctctgccatcttaacaaaccctgttcctgggtagggtgtgtgatggtttgttagattgagatagcatcatttatgaggcgagggtgctttatgaagtgggccctattttgtccttttgtactaggagaaatgttaaatagatagaaaccaaactggattactccagtctgacctcagatcaggtaggactttaatcattgaacaaacgaacccttaatagcagctacaccattaggatgtcctgatccaacatcgaggtcgtaaaccttattgttgatatggactctagaataggattgtgctgttatccctaggataacttattccgttcatcaaattaattgaatcaatgtatgttaactcgcttagactagtgaggtcttagtttacgttgtttggaggttgaagtatgctccggggtcaccccaaacaacatttttaatgcagggatagtaggctagggcctgttggcttgtttgagtttttatttgtattaatgaattaaagctccatagggtcttctcgtcttatttttttatatccacctcttcacagataggtcaatttcactgattaaaagtaagagacagctgaaccctcgtgtagcaattcgtacaagtccctatttagggaacaagtgattatgctacctttgcacggtcaggataccgtggcagttgaacatatgtcactgggtaggcagtgcctctaatactggtaatgctagaggtgatgtttttggtaaacaggcagggtaagatttgctgagttccttttactttttgtaaactttccttagagcatgcctttgttgagttaacagtgtaaataatagggtgcttattatatcgtttattaatattaggctgttaactgtcagtgggttattctggcctgatgtaagcttatgcaatggagaatgtcttcatgttacttatattgacattattgcttctattaaataatagattagtccaatgtgatgttaggagttcagtagagtgattagaatttaagatagttagatgttgagcttaaatgctttcttaattggtggttgcttttgggccaactatggtggtaatattttttactctctgtaggaaggttgtttcctagggtctaaagagctgtccctctttagactgacagttaaacttactgggaaattaagtaattctgtgggtaagtttaaagttgaactaagattctatcttggacaaccagctatcaccaggcttggtaggcttgtcaccgctactcatgaatcttcccactattttgccatgtaggtgagtgtgctctttcagctattcttgggtagctcatctggttttgggggacttggctatagttctctgtgtaaagtatttctagttaatacattatgcagaaagtataagggcttgtctttgctttttagtgcttgatatagttctttcatctttcccttatggtactatgcctattgcgccagggtaaaaatttctgttgcctaaacttttttctaaggtaaatcgtttgattaagatagtttaatagtatttttagcgaggtttggggctagagttggctcaaagtgatcaggtcacaatgaaatcttccaggtgtaagctggatgctttggtttaagctacactttggtttgtccaagcgcacttcccagtatgcttaccatgttgcaacttatctcctctatatgtgcatagaaaactattagtaatagtgatttctagagtaatatttgaggagggtcacgggtggtgtgtgcatgcttcatggccttattcaaccaagcactctgctcttggtttactgctaaatcctccttgagcccttagatttcctaaaggatgttgtgagattttctggacatagaaaatgtagcccatttcgtgccacctcatgggctacaccttgacctaatgtttttatgtgtgtacttgtgcttactttgtgacctttttagggtttgctgaagatggcggtatataggctgggggcaagaggtggtgaggagcaccagggtttattgattatagaacaagctcctttagagggatataaagcaccgccaagtcctttgagttttaagctgttgcttgtggtactctggtgaatggttttgttaatataactattagagtttagggctaagcatagtggtgtatctaatccaagtttggattttagctattgtgtcttcaggatattaaagtcactttcatagtatattttatgtcagctggagttttttacagcttagatggagcttagttttattgagggtagaccttaaacactctttacgccaagttctattagctcgagttaatcttatggccgcagtggctggcacaaaattaaccaaccctaaatattagtatggcttggtcaaactttcatttattactaaggatttatcactgctgtttcccttggggatatggttgagcaaagtgttttgagctgcattcatgcatgtttgatacctgctccttttgagccggtgatccagagggcattttcactggggtggggatgcttgcatgtgtaatcctactaagagctaatgaaaaggccagattgtttatctgtttatctactaaaagacatcttggttgctctgatgttttcgcaaaaattataaatgaagctactaaaaacatccatgtgcaggtttttgtgtagatacatagtaatttttaagagtgtaaaattgtcaaaaattaatcaaagcttgtaagaaacattgatctagtatgtctattgtcccaggtaacgcttgtatttcacggccttctttcctttttttgaaccaaagcagaggatttggtaggtctctcaagcattatgactaagaatatgagagaagtagattttattaatgaagattttcatacttatctgaagcattttttctgcattttctgctgaagcataaaatgactgtgagaggaagcccttttgccttgaactaaacctcaggaaggccaatgatctgtgataaatacccgatttgcctgtccttcttgtagcttccagaatgagaacagaaaagctagaaccggaaagagactcagcagatacccactccacctcatttgttttgtaaatataggaactgcaatccagaaaggctatgtgtttcctgtaaagtcacatgacgaagttggcacatctcaatgggaacccagtttcactgacccactgcctcttccttttgtaccatatgtcttgaaatagctttagttttaaaatttcattattgctttctgactttataatggtgttgaccttaatctcattgcaattaaatgacttcttctttcacatgattccttgtgggtagaattacacacaattactgcagtacagcataaattccagagctactgttaacttgaaatgatgagtaagtacaggatgacctttgctgatcaaatatagaaacagaagaggtaccccagattgtgaagagggtaaagttgctcaacatattcatgtgtatctatatatgttcaggcctgcaaactgtgcaagctgtgggggtcactgtgagttcacatgtttgattaacttatacaacttttaccttgactcttttttttttttttttttgagacagagtctcgctctgtcacccaggccagaatgcagtggtgcaatcttggctcactgcaacctccgcctcctgggttcaaatgattctcctgcttcagcctcccgagtagctggggtagtacagatacgtgccaccacacctggctaattttttgtatttttagtagagatggggtttcaccatgtcagccaggatggtctcgatctcctgaccttgtgagcttcccgccttggcctcccaaagtgctaggataccttgactcttaagttttccatttcctttcttatttttcttccatgacacaataaagactaaaatacaaatcctctgcagaagctatatcacataaagcatatgcattattcttgaaaaattatgcaatttttatcattgagaatagtatgttgaaaataaactcatttagttaaaatagggataatcacttcagctaaagatttctttctatacaaaccaattttgttgtcttatggtcacaaattggatttctaacctggagcaaattctcacagtcatgtaattgatcataaagtaaattcgaaaagtgagaaaaattagaatgcatctaatgctatgactagaaacaaactcagaaatttatctcccagtgtttatatgaccatagtaaaagctctgtacacatgtgactgagtgtaaccattaggcaaatgttgaggatgcaacactaaatgatgtgcacatttgacattcaaacttttggttttattggtattgactatcaaataatttaactcagaagataagtttactttgaaaattaaaaatcccaatgtcttgtgggcatgtgtgtgcatgtgtgagtatgcagtgtgtatactggaaaattgccagtgtttcaccgtatgttctcaaaaaccagttattttgaatagctgaaaaaaagcatccctgcaccttcaggtagtcaagtgatcttattattatactgcatctgataaatcacttggtgctattgtgggcacaagtatataaaaaaaactggcactcctcctaccttcctttgccaacacataaatacccatagaaactcaatattatcttaggatgaagaccaacacattttctctgagattatttatactacttatatggccaaaaatttttttttgataaatatccttggttatttttagtgatcaagaggctcactctgttctctacagaaattctctcttcagagctcagatatctctggtgggtttctcatacattgaaatggggcagtaacactttttcccattagtggagttcagtataaggctattgcatctggaccccattgcagaaggatcagttatccagatgacaaatgtaccgttttataaggcagtctccctcagagttttcactaaagttagagttatagagatgctttgagtaccagttatttatgcttctctgtctttcttcatcaataattatgtatgtctatatttaatattaatgaaggtgtatagtttcatttcccttttttttggagaaaaagtcttactttgtcacccaggctggagtgcagtagtggctcaaccctggctcactacaacctccacctcccaggctcaagtgatcctcctacctcagcctcctgagtagctgggactacaggcacatggcaccatgcctggccaattttttgtatttttggtagagatggggtttcaccatgttgcccaggctgggctcgaactcctgagctcaagcaatccacctgcctcggcctcccaaagtgctggaattacaggtgtgagccaccacgcccagcctgaaggtgtgtaatttctacaaggaccagaaaatgatgcatccagcctattgggtggttgtatccaagactatgctatttcaatcagtggaattattgtttagggtcttcagaactcttaaacacgtcaataaacttgaagataaatacaacattaaaatgaattataaaatttttatcctttttcattcattcaagtacttattgtctacttactttgggataattactgtcataggcactacagatcaaatatagatttttttttaaagacatggtctctgctctcaaggagctgacagtctaataaaattcagaggcccccatggctaggaatcaagcttgtcagactgcttggttagctttttagttcgtgttttggggaattatcttaatactttggctatatcaaggcttagttagaagaggtatcttggagcaggaaaagtaaacaagactgaattcagtgcatttattttataatttaccaaggtctagccctaccaatattctcactactgtctttgccctaaagttggtcagaagatattaaaagccagaggatagaaatatatacatatacatgtatagagctgtactctactcaggacacaattgtaagaggatatcattccatctgtaaaactattttcttcagaaaagcaagacaacacattcactgaaggtctttgacataaaaaagaagtcctctaaggaaagtttgatggtctgtaatatttttattcactgtttgaaagctattatagcagtcccaaacaggtcccaaaaggagggggaacaacgacttaagtatcaccattgctacagcagagacacatatgaataccactcgcagtatttagcctaaaaaaccatggcatgtgtttcttccctctctagccccgcccatgtccacctcttctttgtggctatcaatcttccttaatgcaatcatttaggtaaaatgagctgctttgcagctccacatgttggtgtttacagctctttatgagccaataggataaatatctatggacattgcaatatctctgcttggatggacgttgatgatattgaagaaaacggtaagttactgaggggaaatcaatcatgtgtacatatatgttgatgtcttgctgaagtgaaatcattaggcaagaagtgaataaacaccaggactccctttatgcttctagactttgcataaaatgaagcagggtgataataatggcagtagtagtggccaggaagaagggaagaaggaaagatcagacaatggttttaacaagacaagcaacagtttcaaagagagcatatgcttactcaagggggaattattgttaggtttggattccaggcaaaaaaattatcttccctccaaaaggctgtggaataatcataaacacctccatcctctcctctcacaccatctcaatgcagagactctgttcttgggaacctgggaagcctgcaacccaggctctccaaatattgggcttcaagaaacacaggacctcttgaaattatagtcaaaatatgtgtgtgtgaatgtgcattttccactgaaaaggtttataactttcattaacttctcacaaaacactctgagtctcaaagttcaaaactactgctattgataaaacattgctttcagagaacacacatataaaaaggattcagtagggatcaggagtagtacaatattacctaacctgatattttcagaatataatttccacataaatcactggataaagagaaattacttagagactgccctttgcacaaaacataaacaactccttaaactccatactaagagttctgaagctggaagtagttaccttagagcagtggtcatgagatgagcaatttggagcctagaaaattagatttaaagttgccagatcactgagtcccttagtggctcttcatttttgtggtgtcgttttttttttcttttttgagacagagtttcactcagtcgccctggctggagtgcaatggcttgatctcggctcactgcaaccccctcctcctggggtcaagtgattctcccacctcagcctcccgagtagctgggattaaaggcatccaccaacatgcccgactaatttttgtatttttagtagtaacagggtttcaccatgttgggcaggcttgtcttgaactcctgacctcaggtgatccacccacctcagcctcccaaagtgctgggattacaggtgtgagtgaccatgcctggccatttttgtgttttaaggtatcatttgttgggcacctaccatatgccagtaattgaactggacactatatgtacattaatttacacatttcattttcatgggtaacacaatgtttaataagcttgttcctgattcttgggtgtttttccagagaccctaaaagccaagaataagtaaacaatcaatggcaagcacttccacagcacaaagcaaggttctggttcactgatacaagacagactacaaaacagtaaaagcaaatcttcattagccaatcactcacctccaaccttcatgagagagctaaaaaggccagtgattttggtggggatcatttcggagtgaggtgctgatgtgcctttgacattccctgactcaccaccacccttccccatagaggaagatggtggagagcttcactctcacctgtaccaagtgaaaaagagaggcttcaggaacattccttagagggtttagcatgtgttccgtaaggctggggagttccaggctgaggctattcttgctaggagaaatctaaggtaggaggctgtctgtagcagaaagatcaaggggatgtggtacggagagcaagccacacttgtattcatggcatgggtctttgccatggaccagttgtgggctttatggaagagaggtagcctggggttgtttggacagggactctacctgagaggactatctggagatgtgataaatatcacagaggaaagaatccccagaagttcaagtgttgaatggagaaacataaatgcccttatagaggagaggcgtggcctgccacactagaagtgcattcttatgtcctcggtgtggaatctgagagtctgctttggacaacatgtctaatggccaataccacttgacaactgtatccatcaggtgagacatgtttctctcttatctttcttattttctacataccatgtgggaatataccaaagcactgtcacataagtagggaaggaggtaaggcaaggaagaaaaagcccactttgccccctttttttgtgtaggctttcagtcttgcagcaggtttgaattggtgctggagagaagagtaattggacaagagctgaaggcttgttattgtggtggataaaactagattggacttttagataatctaaaaataatgtgactatataccctgatttgcataggccatctttgatttcacctgatgcccttgtgtagataataaatagccatcctttcactttcaacaatgagatgatttggatgataatttatacggtcactcaatcccagagcgattctgaaatttatggtacctgattggaaatttcatccactgatgggagaaacaagcgaatattccagttacaaagtggagatggtaggaaaggattgtttcctttttatacataaagtaatgtaagaggacactgaatgagaacaaagggggaaatatggtcatagtgtatcattagaaaatatttatagtaaactttataattatctttctagattgcaaatgcagtcctcctcaagagacagtctttatatcttgatcttatctctaggtaaatattattttctatggttacatagagatatcaagatctattggaaactcttgatcattacaatcaagattctggtgaccaaaatggacaaaaacatgtaagcagattgtgttacacaatttttatccagaggagttatttctatccagatgcatttttcattacataagaagacaagaaaaccgagaaaaactctaaaaaataaattcttgctcagctaaattatgcttagaaaatatcctgtcatttcaactaaaaatatcttgttttttatgtatggctatttccctgaaaatgacattaaaaaatcatgggaaatatataaatattttagtcgtatattgcatagtaaaagtataatttatcatagaaaccactcacttctatcaaaatagtctgaggaaacaggtgtagaatagattatattccatttaaaacattgcttgctttattgtttttaaataggcttatgtgaaactccacccgctgggaaaaaatgaaatcaggatgaatcatacatccaaaggtcattgatctaaaaatataggtcttgtaaaatgaataaacatattctattttgtgaaagcatcaagtgagaggattttaggatccttccaaatcattgaagtctcccaggttgttaattaatttatcagtaacagaggaggcagccactctagtgccctgtcctcctggggaagcagagtagataaaaggtgatcctgctgaggaaggatagagatcaagggccttaacctctccccaggagagagagagaagcatatgtgcaaaacagacaggaaagctcagccctctcttgattgcttccattgaaagcagacttagtaggtcctcaggaaatactgcctatgatgatgagaagcatgcaacacttccgggccagaacacaaaattgaccaatgaaaacagaactagtatttgttgtcatccaaacattaaacaaaattctgaaaagaaatgaaaaacagacatttctcatgtagagccttccacagtttttatggagagggagaatgatattaagaataccaggggtctacctgtgttgctggagggagctaacaggaatgtactatttgccaagtgtatttttctttttaaattttttaaactgagcccttaatcagcagacaactttctttgataagtattagaaggtacataaggctgggcacggtggctcacgcctgtaatcccagcactttggtcagacaaggcaggcggatcacgacgtcaggagatcgagaccatcctggctaacacagtgaaaccccgtctctactaaaaatacaaaaaattagccgggtatggtggcacacacctgtaatcccagttactcgggaggctgaggcaggagaatcgcttgaatccgggaggcggaggttgtagtgagccaagatcacgccactgcactccagcctaggtgaaagagcaagactctagtcttaaaaaaaaaaaaaaaaaaaaaaaaaaaaaaaaaaaaaagaaggtatataagatgtatattgtcgagttttggatagcttgatgtaaatagctgccttgcctcactgagacctttttttatagtggtgctttggtgtgagaaaataaagaaaaaagtgttctaaatgtgttttgataatgctgcttattggtgaataaatacacatatttacagtggagtaatcaatggtcggggcagtgagatctgtacaccctggatgcaggctatttcaggatatgctgtcattagagaattaaaaacaataataaaacaaataaaagccagggtgacttttattaccactatgtgctggtaatcataaacattaacagtaataaaatactcttcctggccagactgaacccctccctccactgacttcctcacgccaggggatgtgtgtatgtgtttgtgtgtgtgggtgcgtgcatatttctataaatgaaaatctgcaggcacactcacatataatgacccacgtagagatctcattttgttaagagggagcttattcacacgtaaaatgctagaatgaccctctaaagttcaagtataacctggtccaggactcaacactagcttgccacaaaagcttgttatgtcattgaaaagctaacttttttaaaatgattttttttaaagaaagtttatagcattgatatcttaaccatgagctaaatctccatttagtatttgaaatcgtgcaggatcatggatgcaaactaattttcccagtgtcacacatttagtaaatgataaggaaggaaattgaattcaggtcatctgaatttaatactttactatgcttctaataaaatatgattatttcaacaaagtgttttgttttcccaaactcagtaaatgatttctttttatttaaatcttattaactcttaaattaataaaggtaggtgtttaaaattcacctagatttctttgacttatattgaatcacgaaaaaaactatgtttaaattaattttatttaaattcttttttaaaaatttcctctaaaaaaatgggatacatgtgcagaacgtgcaggcttgttacataggtatatgtgtgccatggtggtttgctgcacctattgacccatctttatggatagaagaatcaatattgtgaaaatggccatactgcccaaagtaatttatagattcaatactattcctatcaaactaccattgatattcttcacagaaatagaaaaaacgattttaaatttcatatggaatcaaagaaggccctgtatagccaagacaatcctaagcagaaagaacaaagctgtagcattacactacctgacttcaaactatactacaaggctacagtaaccaaagcagcatggtactggtaccaaaacagatatatagaccaatggagcagaacagagacctccaaaataacaccacacatgtacaaccatctgatctttgagaaacatgacaaaaacaagcaatggggaaaggatctcctattcagtaaatggtgctgggaaaactagctagtcatatgcagaaaactaaaactgtacccctccttacaccttatacaaaaattaactcgagatggactaaagattttaatgtaaaacccaaaaccataaaaaccctagaagaaaacctaggtaataccattcaggacataggcatgagtaaagacttcatgacaaaaatgccaaaagtaattgcaacaaaaactaaaattgacaaatgggatctaattaaactaaagaacgtctacatagcaaattttatttaaattctaatccaagctttctttgtacatacatgaggactatcaaattgcatttccccaaaataacttgtgatttgtctcatttgtttatgcagacataaaaataaaatactcatgatcacaagtgtctatacacttgcatgtatgtatgtgtatatatttgtgctgcctatgatacacttgatcagtcaatagcacatgagctctcagtcattaatttctataaaactggtaaaaagtaaagttcaagaatctgcattttcacagagactgtcagcgcataatttccaaaatacctaattgataaatacaaatatctaaaatgtttagtaagggaaaatttgtctttaatattgaattctttttttgctataaaaacggccctaatttaattagttttagaataaacatggggataattttgaatgtactgatagaaatattatcttacataatcaccctgataaatacattccattgtattcattggaatacaattgactgatatacagttaatggagaaaatggacatatatgtctatgtctttatatcattttgttcagtgctagtgcagggtgctgtgagaacacaagtgaaggccacctatatccaactgggtgttgtagagtgtggcctgaagtaatatgaaagtgaaggatttagctaaagaaagaaagaaagggggagtagagaaaatcgtgactcaagcagagggaaacatcccaggtgatgccatgaaggtacgatggaacatgacaaggctaaggaaagcaagccagttatatctaaaacacaggttgcatggactagtgtggaggagttgaggctagatgacagagagtagacagatgtagtgtgttagcaaaagaaatttgaatttatattgcatctatggggaaataaggcagaagttgatagtacacaacccgaatcttttttcttcttgggtcatagcttgactgtatttcagcctcactcagaacaggatgtagccatacgactgagttccaggaatgaaaagtggcagtgataggtgcctctcctatgggggtcatcttctgtctcatttggatggcgatattctgaataagcttggctgtcatgtgttgaagatgccagagcctcgatcagcctgactgctgccagtgtaacactagatgtaaaagatgacattaccagtgcttgggtcatgacagctgggtctaattgttaaagcagtttgaacaatcctaaattgggaataaattgaaggattgtaatctgggttgtattataatccgatttatatttgggagctatatctttgacaggaaggataaggatggaaggaatcatttaggaggctactgtagataatccatatttgagatggtgaggactcagaccaaggaagatgattagagagttatatctagcctgcctttctttctttctttccttccttccttccttccttccttccttccttccttccttccttccttccttccttccttcccttctttctttcctaatttttttcctggacttctttttaattccgaggtaaggttgcatatatatgccaagtaaaaaggcaatggcaattgggataagtgggaaattcacaaacccaagacctttagtaggtaaatctgtaagatctggtgattgattgggtgtggtggatgaataaggagaaatctagaatgacttacaagcctctggcttcagtaattggttagatacagtgtaggcaatttagagaaaaggcattgttaggaggaacagtaaaaatgttctatgttaagcatgttgactttgatttggctgtaaatcactgaggaaccaaggaggatatgtctaaaagatcattctatttggagttcaggcaggaggtctgggatgttgacaattttgcactgtcatttctgtataaagcaataaaaactagatgatgagatggtacaggtcctcagactggtgacgggaaataaaaatttaaagataaacagaataaaaagagataacatcagagagtgagaagaagtgaacaaggaggttagaaggagagcaaaatagcatggtagtgatcaccaaagctgaagagagttcaagatccaaaattccacagcgaaattaagataaggactaagaataatgcattagataatacatcaaggaggttattgttgactttataaagggcaattggaaagaaatgctggtgacaaagcctgattgcaatgtattgagcaatgaatgggtggaaatggaatccaaaagtacagataccccttttaagcagctaataattgggcaataactacagaggaactttgcatcaagaaagatgatggactttttttttggctttcgattgagaacccattatcatgataatactataaaaataagagaaaattttaaagatatggggggagagatgacacatgatggagtgaatccctaaactcatgggagaagaaaggtgaatagattaaacttgggcaggtagtgctgcctcttcctctgctgagagagaagaaagaaagaattgtaagtttatgcagactatggagcaagcccccctttgatggtttatcttttctgttatatagaaaatgaaaccatttgctatgagagggaaggcaacgtagtaatggattttgaccttaaggacaaagtttggagaaatcccctgagagtagtgggaaagcacactgactaggacctaaagggaattgctaggttgcaccaaggacccaggtggagttggataccaagcctttgcaggggcaactacctcctctcctgtgtgatttttttctacccttggcaggatagttgggatccattggcagaacagtcatctgactgcttcaatccagggttgaggctcacagagctttgtagatgaatgaataaggtagcaaaatatgtaagtcataatgagcgagatctttgctaaaatgtcatgtgtgaatgtcgctaataattttggcctgtaagcctcattggattgtgttatatgcagtgtggaaataatgctttggcacatagtatggaaattcagtatcaaagaggcaaaaaagaaaagcctgccttaatgattgacttccagtgtgtgaaacttgatttaagatataatggtgttaccagtgtattttactactctctttacagtctttaagagctgtcctagactaacgtttatctgcttaacagatcttccagaagacagcagtgaattccatcctgacgtgctggtttgtcttcttatgaaaacagcctaagttcttgaacttgaaatggtgataacatattttcacttttcacatcttatgggttttatttggctccactttgctcttagaaggggacaaagcaccagagggaatacacacatatatttgaaaattttcctcttggctttcttagttaacctactgcttatgatgcaaaatcactgtatctgatttaaaattgttagagtgcaaagcctcataatcataagaaacatggtgctaagtttaaactgggaaagtactttactctcagagaaatattctattttgttatcttagtaataatagaaagtgacatgtctttgccactagctgacttttgtgtgttgcttttcttgccaatagccacagggttgtatgttgatcctgatggatggtgacacatattggtaattatgttgacatgaattctcttgaccccctccccttcattggtagagtgtggggtgggatattttttgtagttttagctatgtgccaaactaaatattacgtacttacttagtgatttatgtgagagtcttttcacatttgtgatgtggtggcttaatattttttgtgttgaaaagtatatttatgaacatatatctgtacatatgtaggtaggtgtgtatgctttggggctaacatcgtaacattaacaaattactacaattgataaaaataactgagtggttattgagcatttctgtggcagttgctatgctatgtaaattatatatgatagaatttcaccctcaaaataagcccaatagttcaactttattgacgcagaagctaagactctgaggtattgtaacttgtcaaggacatataccattaagtagatgatccacagatgaccctaaagtccagatttcaaacacacactcaactactcttcttaacgttttctcaaaaagcttgtaagagtgagtgtagttaattaagcaaagaaaatgtatttccacttccaaatggtgtatatttgaatttcataatttatggcatcaaatggcaaagctttgttaacacttgtctgtactaaatgattccattaactgttccttaggaaaaatagctgtaattgtaagcatgcttaaaactatattctttgttttcctattgttttatagattatttaatacttagtttatatatgtcatttatgtttgccctttatgtacatgaacaaagatgaggaaattgtagatgggaatcaaaagtcagtaagaggtaagtattatctaatcaatttaacaataaccttatgttgaaggttattgtatggaattc

SEQ ID NO: 105 - DNA, 171486 bp, Homo sapiens
gaattcacttgagaggatgctcttgactcattctctctgctctttcctgctcagatttctgataaaaatagagagcataggggaacagataatgaaataggaaacccactcgtgggttccacagatacctaccgaaggcctactgtgtgctagaattgtagctcaggagttctcagtgtagctgctcactgaagttaccatggcaggtttcaactggcagaatccaggctccgtcccacccagagattctgatgaaattggtttagggtgtggctcgggcctcaggaattcagaaagcttcccaggtgcttccaatgtgcagccagggttagggacctctaccctagacacaaagtattggacagatagacctggtgccagagatggccatgagctgtaagctaggacgtgccccacctgagctctgcactagctagttcaaacaggcgctttaaaggcagtgtgaaaggggacagcctgttctgccaggtctcagaatgtatatttattaagtgccattaaaagggacctgaacaaaattggatgtcttgtaggcataagggaggaaaataaaatatacttggaaccaagtctatgtcatgaagggaaaataaaaatgtattcagtagcacgtgggttatggtttctcatagaccaggggataagattaaaagtcactgaagagtgggaaaatgcatgttgagaagatgagaatggcctgtattttctccaggggaatctgtgtaatgtgccttttccctctccaaatgcctagaaccatggcactgtgtcttatttatttaaccgttgggctgtctcatactaaacttgcaaagatatttgcctatgaactgaacaagacttccaggagttgaagtctggttcacaagggtaccccttgcctcctgtgatggagtgagaactcttaaacccctcaggccccaactcagttgtggagatgaggacaagattacaatatcaaaagaaagatgaatgaattcttggttaatatgacgaaccccagctcaatgagtaactgatgtgaactgctgggaataaaggacttcaaagatggaaagtctctggaatttgtgtgactctaaacattgggtagccagatgccccgctgtgccatttgtttgctagacacttgctgtatataaaaataatatcttgtttgctcaggtgtccatttaatggacacccttcacgcctcagggagctggcctgagctgctgggggatacagaaagaaatcagacagatgaggcccggtcttccagatcccagtctctaaggcaggcagatgaggcacccatcaattacgtgccgtgtaagtgtcaggatgaagtaatggcaggtgccacgcaagccagggaagaggcctacctctgtctcagacttggcggccaaggaaggcttcctggaagaggtgatatccaagctgaggcccagtgggtggttaggtgaagatggcagagagagaacatttggaggcccagaagtgcagcaaacatggaaaggagccttggattttattctgagggcagtgggggaggcatgaaagggtttgaaacagaggagtgatgtgctcagggttgtactttgggaagatcactaggctctgactgtgtgcctgttgcgcccacaggcaactgcatgctccttgaggctgagaacttctgattcatcccagaatctccctaagcctttgtcatgtgcctcaagtactagatgttcaatacatattgcttagtaagcatcccagagaggataggaacaccaaagccttgccttcaaggactctcctggccgactggagagtcagacatcaagcagttatctggccctacaggaaaagatgccctcagccccagaggggtgctatggaccaggcatataggtgctcagacaagggagagatttgggaaggctgaggtggccaggggcagtttcctgaggaaggtggtgcaggtgctgggccttgtgggatacataagattggagagagtaatccggctgggtgtggtggctcacacctgtaatcccagcactttggagggcaaggcagatggatcacttgaggtcaggagttcaagaccatcctggccaacatggtgaaatcctgtctctgctaaaaatacaaaaaattagctgggcatggtggcgtgcgcctgtaatcccagctactcgggaggctcaggtaggagaattgcttgaaactgggaggcagaggttgtagtgagccgagatcaccatgccattgaacaccagcctgggtgacgaagcaagactcttgcctcaaaaaaataaaaataaagcaatcctatgggattactctgtcatctacaggatggaggccttctcaggcctgggaggcagtgtggtggcatgaaaaggcccagcacttggcctcagaaaatctaagtccacaccaggccccagtacctcatgcctgtagtcccagctacccaggaggatttcttgagcccaggaggtcgaggctgcagtgagctgtgattgcgccgctacactccagtctgggtgacagacggagaccctgtttttatttatttatttatttatttatttttatttttttaaaaaagaaaaagaaaaaaaatctgagtccaagacctacttggccataggcaagcagcaaatgtcttgactatggatggaccgtggtttctatgtatgaagacatctgctgatggcccccaggctgctctgtcctcccactcagactcaaaagtactcactgcagagttctggccatctcaagggtgtggcaggacagagcctaaaataccctgggctggggcaaaggaaagagctggattccactctggcaacatcatggaatctgggatcctgaatgatttattcacttaaccttgctcatttttttttcttatctataattacccaacttaccttttctgttttctcatctgtaaaatggatacaataattcctgttctcccagggttggtaaaaggattaaataagggacaatcagtgtgcctggtggtagatgtaccaggaatatcactgatatgcattgatggcacagaagaactgtgaccaccaggtggcagcaggggatcagctaagggacggctgggaagcgcctttgggatcaatgcgaaacgcccatggtgccaggcagttagtggagatgagaggaagggccaagtgaaaggcattagggggtggtggggactgtgttgaccagagcatgcacactcagtctaaaaagctgtagcttcttggctccaaccaactgttcccacatcagaaggagggtgccgtggtaccattctgatatttcaagagaagccgccaggaaccagagtttttgtttgtttatttattattattattattattattattattattattgacagagtctcgctctgtcttacccaggctggagtgcagtggcacgatctcggcttactgcagcctctgcctcctgggttcaagcaattctcctgtctcagcctcccgagtagctgggattgcagacatgtgccaccacacctggctaattttgtgtttttaacagagatggggtttcaccatgttagccaggctggtctcaaactcctgacctcaggtgatccactcgcctcggcttcataaagtgctggaaatacaggcgtgagccaccgcgcccggcctatttttattttttgatgtgacatcttccatgtggagatcgcgtagtccacaacagtttgcctccttgcatattctgcctgaatgtgggttgagtgttcttggtggagatcttctctgaagaattactttcgtatcttcgtatttcctgtgaaatccctttctccatcgtcactttaatcatcccttcatcagacattaatttcccttccttagatctctgggaagcattgtttcctttgttaatgttattattgttgttattgtcttcaaatttttattgtcggtcatattttctgacccactagacaggctccccataatactagcatacaaggttcttcggagaattaaatgagatgctgacataaaccacttagccaagcacccagcccattagtgctcaataaacctacttgtcattattatagggacttccgaggagatgcgtgaagtttagaggaaggtttgcagggcctgtctgcctccctctatgtgggatgctgatgaggccactctcctatgtagaagaaggccccttgtcctgggtcctgagggcttagctggggttgggcacagctcttcactcaggggctgctgtcacaccccacaggcattcctggggctttccttcctctcccatccctggtgctgccaggctggggcagtgctcgtaggcacaagcacctgagggtttccccgcctctctccagctgtagggtgttctggcatccactgcatctgcacaaggacaagccgggcaggtaaccaggcaataagcaggcacactggatactgatggagcagttcctgtggttataggctcagggcgctttgcagccaggagcatccttttaggtgtttctaggggacgcagcagctttggggcccaagagtctgctggaggcttcagtagaagcttaaggagtgaaaagaagtggggatcagtttgccctcatagactgtcacttatgactgggctcaggagcactagctgctggccttcagttaatcctggaggtctcaggcaggacatctcagcgtctaggacatctcagagtgcttctgggtttcccatcttgggcctgtctgcctgtcattggtcctctagggtctggatatcctcagggcctgtgagtggaaactgagttgtaagcagcggctgccggtttgggacagccctgaccctcaggcaggctggcccgggggaaacccaggactggcgccctcccatcttgagcagctcctatctccagaggtgggctgtttgcttccttgccatcatgtttgttccctgccttgctctgctctgtgctgcagggaactccatctccccggctcccctcccctctggttgcctggtaggtttggccaatgggaggcactggcaggtgggagaaatgcctcagtttcccccctctctgcttcaggtagcatctctgacagtggccggtctcctctgtggtcccagctcccactggacagcccctcccttgtggtcccacgtcccatcaaacaggcctggctgtgcttccagtttctgtctggtgacaccagatcctagacactaggatcttccccgcatccctccagtggaggggttgtaatgtctttttgctattgttcatctctggggtgcttctcagatctttcacctgtgtaacctactccccagaatgaattccttctgttctttttaaaaatttttagatggagtctcgctctgtcacccaggctggagtgcagtggcatgatctctgcttactgcaaccttcagctccttcaggttcaagcaattctcctgcctcgggctcctgagtagctgggattacaggtgcccgccgccattcctggctaatttttgtatttttagtagagacagggtttcaccatgttggccgggttggtctcgaattcctgacctcaggaattcctgaccacctaggcctcccaaagtgcaaagattacaggtgtgagccaccgcgctcagcccaaattccttctgttctaatgcatagagtagtttctgctttctgactggacagcaaaataccactcagaagccagggctgcagggaggggctgggtcttggtgctatgggatccctggcacctccctggtacctggtccctcaggcagcccagcccttggggaacaatggaaatcatctctaggtctgtctgcaccttccctggttcagggggctgtcagccattcctacatggagctcttggaatgtcttcagtcccagaagaactgagctggtcatgctccagtatcagtggctgtggtagtctgctgagctgccccagtcttggctggctgagaccattactgccaggcccagagcagacaaacacagaggaaatccaagggcactgtgtcagtgcagagccagggtttggggaagggccaggccctacagccctgggggaggggaggaggaaacacaattttctagccatgatgcctcagcagcatgtgtctggcccctactcagaaggggcagtgagccccaggtttgggaaatgggaagtgggatggggcttctggccagggcagaagctgctggtcttggggtctcagggctcctgggcacatcagtagagcctctggtgtgggaatagagcagcacgttaatagcaataactgcagcatctattcactactcacaaggctgtttgaggttaaacgagggaatccactttacaggactaattcaatgcctggcacataggaagctctcaagagctgcaagctaaaagaccaaacacaagtctcaacagcagccagctgccatgggcctcacgctgttgggctgtcatgagactagtggtctggatggagccccaggcctctcccctggggcagggctggaattggggacacagatccagctagaagagggccgagtcaggtgaaggatcacgggagttgggagggcatggtgattctggggcacactccccagggatgtgggggaggcagcaggtgtccatcaggcagttggagctgccgtgggacacgggaatgggcatctcctagtgtccaggcaggtcagaggtcagagccaggtcagactgtgggcagcagggtttcaatctttggttggggttcaagcactaagctctggggaaggagagatcaggccgatgaaagatacagagatcatagcaggaggcagcattgagaactgggcacagggttagagtatgactgtcagtgcaagggactttgtattgggctctggtggctgccctagagctgcttaaaaccctcccatatgaggacagcatggttttagggagccatgtggggccagacttgggagagtgtcttgggatgaagaggtggggtggtagccagaaggccagacttcccatgcaaaataccctcgttcaaatcctgtccccacacttaccagctgtgtggccgccttcaaacaagttgcttcatctctctgacgcctcactttcctcactttcctccttgtgggcaaaccaggaaagagtcctgccgatggggttgttgggatgtggacacaggatacatcacgggagactttggcactctgtcaggcacataaaagtgcttaataacaacttgatccttggccacacaagccagttttgatccctcccccgcccttccccgtatttcttccaagtgttgcaggcagcgaccccacactcacacccgctgtgccttcagctttctccctaatgcccatggctctgacccttcaccgccgggaattctgaaaaataccccatggctgcctgagttctttcaaaactgaaagcaagtagatgtcttaagaggccaaaggttgttcccctgggaacgtaactgtaaccatgtcctcaaatactctctggcgatcagtcggccatcttgagttactgcaggctccaggcgcctccccggtctgctgatggtgcggttgcagctgattggccggcgtgtgggagtgcaccttccccctacttttttgttttttaattttttaatcatctttctaaatgcttttattttcatttttcatcctccctgctccccgaaaaagtcatgggtcagaacagcaaccataaaatacaaatgcaaacacagaccaggcacagtggttcacacctaaagtctcagcactttgagaggccaagacgggaggattgcttgagtccaggagttcgagaccagcctgggcaacatggtgaaaccccgtctctccaaaaaaatacaaaaattagctgagtatggtggcacatgcctttggtaccagctactcgggaggctgaggcaggaggatcacttgagcctgctgaggctgaggctgcagtgagctgagatctcaccactgcactcaccagtttgggtgacagagtgagaaaaaaaaaaagaatacaaacacattaatacacacacacacacaattggaaaaatctcaacatccatccccttctttttacacacccccatcccacctcccacaccagagattccagggtgtggcactccccttaggagcattgtgcctccacccctaccttgaaaatcacagctaccagccaaaagcactttgtccagatttactttctgtcatttatgctgtgggtataatttttttgttgtttttcttaatggataacaatatgcatgtaatacattatttttaataaaattagatattaaatttaaattatataatcctccccccaaaattcggtcacatttctttagccccctgtaaggtacaacatcaacaataaacacctaccctgcaacttggagcttgcaaacacctaacctgcaatttactaagaggggaagatgacggcaagcaaggctttgtgtcactcttcccatagtcttcccctcttagtaaacagtgccatcatccacacaattgttcccaccagaaaccggggcctcatccctgattcctctcttcctctcagcccttcacattcaaacctttcattttccctcccaaacctacctgaaattggtccacttctgctccacctccaccctctccgcaacttcacccatcatctcttgtctggactcctgaaggtctctgttcccacctcagccttcacccacaacccactctccatagtgtagcaaagtgattcttcaaaataggaaattggagaatgttagtcctctgctgaaaactgtaccaaaacccaaactccttactctgaactaagaggccctaactgtcccactcaccttgcacaaccctccccttggtcaccatatgagggccacacttgctctgtctccgtttctcagcgactcttaactaagcttgtccctgactcagggccgttgcactgcacactgcctgttcccttccccggaatgctcttcccccagatctgcccatcgccagttttccttgccatgaaggtctcagtgtaaatgtcagctcctgagtgacgccttccctgaccactcaatctagtggcctccagccctccccatttcacccctcaccactcattattgtatcaccctgtcttattttcttattttgttaaaataaaaccttttttttttttgagacagggtttttctctcacccaggctggagtgcagtggtgcaatttcagttcactgcaacctctgccttttgggcttaagtgattctcccacctcagcctcccgaatagctgtaccaccaagcctggctaatttttgtattttttatagagatggggtttcatcatattggccaagctggtctcaagctcctgagctcaagcaatctgcccaccttggcctcctaaagtgctgggattataggtgtgagccactgtgcctggtcttgtcttattttcattacagaacacatcactccttgttttcttgtttctgtatttgtttattgtctggctcactcaagagaaagtaagctcctcaaaggcagggtctttatccttcttattcaatgcaacattttgggaccatacttatactaaaaaattattcactgtttgtctgaaattcacattttactagctgccctgcattttatctggcaaccttacttgaggcccacggtctcacatcttggggacatgggcccaggagagtgaggctggcatgtgaagaggagacaagagagaaaatacttcagtggagagagacagagaggacacaaggaagacagagtgtcagggagagagagagagaaggagacagcatagagaatgagcgggattgaataaaagtgacgccaagagagaatgagggacagaaaaagagaaaaacaagaaagagtcatagaataagacagggtcagagagacagagagagaaattgtgagagtcagagaaaggtcgagagagaggcacagggataccaacaggcccctctgatagtgttcaagtcccatagttcagtgacccaggctcagctccacccctgctttttctgtagtttgtttacaggcaccaatagacttcccttttgcttaagaatagtagccaacatctcttgaatttttgtgcatgccaggctggggccagatgcttcgggcgactgtctcctttatcccgtcccctcacaatgcttctgtgtgattccctctgcagaggaagaactgaggaacagttctttaaataacatgcccaaggttacagagatgctaggcagcagaggtgggattcaaacccacgcagttagtcgccagagcgtttgactgccacgtggggtcattgtcagttgcaacgaaggagttcctgagtggcagttgggtagagccgattcagcagagaggctggctcacactggaatggtgaccccagaccctcaagaggcagattggcatgatgttgggaaagttctttatcttctcggagcctcaacttcctcttctgtaaaatggagctgatactaacattagctatgtcctagggttgattgatatgtaggttaagtgactgactgagatacacacacacacacagcagttacatcaagtaagcatttaaaaatactcacagacattttcatgatcttctgttcatctctgacacccagcacaggatctggcataaagccagtgcttaggctaccttgatggttgatgatgagactggagaatattaacgagaatcctaatgatcatttattcaacagctactacataccaggcattgtgctaagcaccttacaggtatctttcggtcaatctcctgtcaatgtaggtattgttatccccattttacagatgagaaaactgaggtcccatgaaatcaattgaccagaaaggccacagagagaaatccagagctaagatctcaaccccagtccataaggaaaggacaccagctcagtgactgtgtctgctttaatgcagcggggaagtggatggattgcactgagatgttttcctgtggactgaggttttctctttttttctttcttcgtgtgtgtgtgtgtgtgtgtgtgtgtgtgtgtgtgtttgtgatagagtttcactctattgcccaggctggagtacagtggcatgatctacactacatgatctcactacaacctcgaactcctgggctcagagattctcctacttcagcctcccaagtagctaggactacagaggtgccaccacacccagctaattttttactttttgtagagaaggggtctcgctttgctgcccaggttggtcttgaacttctggcctcaaaagatgccctcgcctccgctgggattacaggcatgagccactactgctggcctgggctgagttttgacagtttaccattctcttcatgtcccttacagatgccctgtgtgcacactttttaatgcactgtcatctcactagatggctgttacgagtcccatcctatgacggaggcccagagactgagggacttgccaagggctacacgggaattaagaaaagagcaggttctgaactcagcttcgtctgactggaagtctagtctgtccactgtacccaactgtctgaactacagggagccccagcagagcatgacatccctcagatctcccgaaagcactcacgtttcatcatgcccactgccaacgaacgccccacattggggtccctgagtgtgcatctcttatcctacaatagcctctcgaggcatctccagcccagttcctcctgccttccctcttttcttcgaaaggtcaccaccagggccagctttcagaagcacagatttcactgtgtcactccttccaaggctttatggtccgacctctgtttattagtcccctcccaccccgacttgaactctctgccctggctgagctgaagtttctctattgctctctctgacacgtgctctttcatcttccccactctccttcacccctgctaaactatccttcaaatctcagtgacatgtcgcttcctccaggaagtcctctttgcttggttcaggtgctctttctgtatagccttctactcaggtccttctccctctctgttgaggttgctgttttactgttttacttgagggtctctcccactgagtcagcttcataaaggcagagtccatgtctgtcttgttcacacttcatccccagagcctggcaccatgtctactacgtggttggtactcagtgaaaagctgttgaataaatggacaagtacacaaatgaggattccattattattattattattattatttacattcagcatcaagctcagtttgctggtacatagtaggctcccagagacatacactgagtggatgacagaggaatgaacaaatgaattaaaaacatggctcaacctccacaccccagcaccatttgctcacttcttagcttgcaggcctctctcaactgcagcatctcttgcagaataaaagggattgcaactccttgtttgaatgctgtggggttttgagtagaaagaaatactcctcctttgacaagaagaatttcaggcgaaagaggcttttcttgctggtgaaggaaggagagagagttggggcctcagccccatttctggatggcctcaattggccctgaactgactaataaagtgtgaaattgactttatcctccaccacatctccccagccaaagtatccctgtagcatctccctctgctacaactgatgcagcactgtcgccatcccctccgtcactgacaggcaggcaggtcattaccacccacgcagccccagggcccagcagctctgcagagcccaggaagtcatttggcctcaggccaagacaggctttcaaagccagaagcatctgacagacgtggcatgtctgatgcaccttctaagcccgccaccggctctttttgtccctatttactcctctggcactggctcactgacttctaagacgcgggtgggggctgcggtgggtgacagcattgagtgagctctttgagcctcatcctggccagttgcaccaaatgcagggttgaagaatcagagccaaaggggtttgagaaagcaatgcaatcagagaattggagctttgcaaaggtagcagctcagggagcccctgaggtgtcttaagggctacttgggagatgataggaggcccccaaggccctctttctaccaggacagggtcattttttttagcctattttgtttattccctagtttaagatttcctaggaggaaggagagtctacagccccaatgaggcctaaaaccagtgatctatccagcagtcattcccaaccttgcctgggaatcaaaattaactgcatgacttggtgagaaacgcagatgctgagccctgtagcatttttatctgctcagaacctatttcctcttcccccaaggatagattccatgttctcttgagagccatacctaccccacacatcaaccgtgtggtgtgagtgaacaccctgcttggtcccttgaaactccaggcacaagcattttcctaggcctggccagtcacagacagagtgatccgtccagaggctggagtggcagcccccagaattgtgtcaaggctgtaaaggaagagaggttctcttttctcggagactttaggcttttggctggtggctgtcatcttggaactggtggctaagaatgaagccaacaaagaggcaaaccatgacaaaggatgaaagagagggagagagagtaagagagaaacagagagacactgaaagaaacagaggcagacagacacatctggtgtcatgttatgagcacctggattcagccatgcctgaagtttatacacctggtttattcaggtacatgagccaataaatttatttttgctttgttttattttttgcctcacccagttttacttgacatgtgtttctgctacttgccactgtaagagccctgactaatacacagaacctttctcagatctatttaattgtgatctccatggatggagtctgagaatctgtatttctcaaaaagcttctcaggaaatgctgataaaggttcaccccttcatcagtcattgtttgggcatcattgagatcctggtctaatgaagcacagacaaaagtgatccttctgtaaatggccattatgataaaagtgatctttctgtaaatggccattatgatactgtaattgcaggttagataccctacacacggtgatatggtttgaatctgtgtctctgcccaaatctcatgttgaattgtaatccctagtgctggaggtgggagctggtgggaggtgactggatcatgggagtggtttctcatgaaatgtttagcaccaccgtcccctgatgctgtccttacgatagtgagttcttgtgagatctgtttgtttaaaagtgcataggacctccctccttgctctcctcctcctgctccaaccctgtaaaatgcgcctacttctcctttgccttctgccgtaattgtaagtttcctgaggcctccccagaagcagaagtcgctatgcttcttgtacagtctgcagaaccatgagccaataaaacctaatttctttataaattacccagtctcaggtatttctttatagcaataccagaacagactaatacacatggactcaatcctcacagcagcctgatgaagtacaggttattcttcccgttttacagatggagaaactgaggcttagcaagaagaatggatgtgttcaagggcactgtattagtccattttcatgctgctgataaagacatacctgagactgggcaatttacaaaagaaagaggtttaattggacttacagttccacatggctgaggaagtctcacaatcatggtggaaggcaaggaggagcaagtcacatcttacgtggatggcagcaggcaaaaagagagcttgtgcagaaaaactcctgtttttgaaactgtcagatctcatgagacttattcactatcacaagaacagcatgggaaagacctgcccccatgattcaattacctcccactgggtccctcccctaacacatgggaatttaagatgagattttggaggggacacagccaaatcatatcaggcacatagctagtaagtgatggatctatgttataagactctgaagctcatcctcttgccaccattctatacctccttcttaattaaagcccagagtggagaggtggtttgcctagagcttcaatagctgtcattggctgggcgtggtgactcatgcctataatcccagcactttggaaggccaaggtgggtggatcacttgaggccaggagttccagaccagtctgcccaacacagtgaaaccctgtctctagtaaaaatagaaaaactagctgggtgtggtggcacgtgcctgtaatcccagctactcgggaggctgaggcatgagaactgcttgagcctgggaggtagaagttgcagtaagccaagatcacgccactacactccagcctgggtgacagagcaagactctgtcttaaatataaatataatattatatattatatatattatataatatatattatataatataatattatatcttatatattatatattatataagatataatattatatgttatatattatatattatataatatattatattataattattataattatgtaatataattaatattatataatatataatatgtataatattaatataatatataatatataacatataatatttatattaatataatatatattatatgatatattatataacataatatttataatattaatataatatataatatttgatatttataaattatataatatataatatttataatattaatataatatataatatttgatatttataaattatataatatataatatttataatatttatataatataatataaatattataagttgcagtaagccaagatcacgccactacactccagcctgggtgacagagcaagactctgtcttaaatataaatataatattatatattatatatattgtataatatatataatatatattatattatataatatatatcttatatattatatattatataagatataatattatatgttatatattatatattatataatatattatattataattattataattatgttatataattaatattatataatatataatatgtataatattaatataatatataatatataacatataatatttatattaatataatatatattatatgatatattatataacataatatttataatattaatataatatataatatttgatatttataaattatataatatataatatttataatatttatataatataatataaatattatataagatttatattatataataattatattacatattaatatataattatattaatataattaaaacaatataatatataatacataatatataatatattatgtattatatattatatattttatataatattatatattattatataatatattaataaatatattatatatatttattatatagtataatatattacatattaatataataaatatattaattatataataaatatattaatataatatattatataataaatatattaattaatataatatattatatatgtcttaaatatataacatataatacattacatattatatataattatattatataattatagataatacatatattatctataatatataatatattatatatttatatataaatacatttatatattatatatgatagatatatataaatatatttgtatatttatatatgatagatatatataaatatatttgtatatttatatatgatagatatatataaatatatttgtatatttatatatgatagatatatatttgtatatttatatatgatagatatatatttatatatttatatattatagatatatataaatttatatatttatatattatagatatatataaatatatttatatatttatatattatagatatataaatatatttatatatttatatattatagatatatataaatatatttatatatttatatattatagatatatataaatatatttatatatttatatattatagatatataaatatatttatatatttatatattatagatatatataaatatatttatatatttatatttattgatatatataaatatatttatatatttatatattatagatatatataaatatatttatagatttatatattatagatatatataaatatatttatagatttatatattatagatatatataaatatatttatagatttatatattatagatatatataaatatatttatagatttatatattatagatatatataaatatatttatagatttatatattatagatatatataaatatatttatagatttatatattatagatatatataaatatatttatatatattatagatatatataaatatatttatatatttatatattatagagatatataaatatatttatatatttatatattatagatgatatataaacatatatatatatttatatattatagatatataaatatatttatatatttatatatatatagctggtattgaaaatgtcatctctcttccgggactctcaatcaatgagtctgtctgagtcacttagtgctatggctacgagttagagaggaccccagtgctactggccaaaacaataagagaaaatttcttatactacactcataaatcccaaagtaggatggcccagggttagttaattcactggcccaatgccatagtcaagggctcaggttctttccatttctctgctctgcccttctcaggtgtcaactggctctcaggctgactctctttttggttacacattgctgctgcagttccagacatgacccccaaatcttatggggtctcctcccctgcctcctgaggcatgtgacttaggcctgttcaattattgtgttcaatgtctcttgccatgggacttgatctgagatagacaatagccccaatctgttccatgagagtcagttcctaggtcttgggctcatagtcttgtgggagagaagttttatttccactagctgccagatttgaatctggagttttcagcaattattttgtagcttcctggggggatattggtctgagaatgaaattaacacaagtgatagagatagagaaatcctaagctgctggatccaactgggtctgaggctagaaaatcctgtatatttcagtcacatgagccaatcccattcttggtcaacccagtggacattggcattctgcccctttgcaacccaaaggtaactaatatagcatgtgtttttgaaaaagctaaacaggtctcctttggctgagacaagtatatgtaaaggggagtaatgggaggtgagattgggaaattaggctggagccacatcgtgaggagcctggacaagtctaaggtgggcccccccagtctctgagaccactgaaggatcatggatctcctgagaccgggtgattacaggagtttccaaatgggctaaactctgcctctagggatcaggttaatgtttttgtagctgctgataaagtagaatttttgacttgaagtaagacccattctctaggcatacattgtccaggggagagttgggtgagttctacatagatatttggaagacaggagctgctggcatttattaactgctcctaagggtcacagatggtgagggtggggaaaaacccaatgcaaccaatgagaaggtctggagatgccatcaagcgtgtccacatccctcaagttgctcagggtaggccatgggctagctagagaaaagggaaagacatcacctccctctttccacaagacctacttctgttaacgcagcctgagattgcattcactttggtggcagcacatcatgcacttttttttggccaccattgactggacatgagttgcatttaaatgaatgtcacaaatgctgccactaagtcatgtctccccagtcccctcaagtctcaccttgagagaactgcctccaccttcaactccttttcaagactctgtaagtcaaaaattagctctcattcttttctctttaatagcagcaaaacaaaaacaacaaacaaacccaaaacaaaacagaaaagcaaactacatattaacatacttgggttaacccctccaaatcatgctctagtgtagtcagtggatttgttcaaatcatcctctagtatagtcagtgcattcgttcaaatcatcctctagtatagtcagtgcatttgttcttgacagagcctctaggaatccagttctgtcctccctcatttactctcctccacctgcatcctcagggccttcctctatctcacaactgaggtcttcctgcaagtgtctgacaaaagaaaatgttgcccggaacagtaccagagacaaagccactattccttctggttttcttccaaccaaatccaaatcaacagatacatgcttaattcttcatatactccatatacatgatctcatctatgtatttactttctgtgtgcagacattggtccggtgctttacgaatgttaactcatttagtcctcaaaacaactcagtaagagttgttatcctcatttgacagaagaagacattgaggcacatatagattacatggccttcccaatgtcacaaaattagtaagtgacagaatggtaacttgaacccaagtagtctgcattcttaaacctgtgccaagggttggtaaactttttctgtaaagggccagttactattttagacattaagtgtcatgaacaattgatcacaactcagtcgctgtagtgcaaagcagccatagataatacataagtgaataggtgtgactgtatgcaataatgctgtatttatggccactgaaatctgaaattcgtatcatcttcagtgtcataaaactgtacccttcttttgattttccccccaactattaaaaaatatagagtccatttttagttcacaggtcatatgaaaacaggtggcagccggatttggcctgcaggctctactttgctcactctgctttgtgctgtgcgactgccctcacctgctccttatagctcacctccttattatctccatctccagataaagacgtgaaatttcaagaggctatgacttacccaaggttacctaatgagcaggttggggagttgggatttgcaaccaggtttgtcttgtctcctgcaggggcaggagtgctggtgcaggggggcaggaagcagggctgagctgggggtttcagcacagcctaactcggcctgaagccaacagtccaccaagagctggcagaacctcccctcccttcccctatcctccccctgccccctgcaaccccgagaactgagtgcagtaaccaggggcctctctgctctgttctgccaccatggtcccattgtcacaccctcctgggatttgtaagcagctgaaacgctctgctttccaagtctggaatcagagccccagaaaaacccagaggccatcttgacttggtccattcttgccaaccacagccattaaggaagggaagacctggtttaaaagggccctgagctgccacccgtgaaacacttcagctctggtccagccaagtctgggaaaaggttggggaaaagtgagggaggggaagagacagagaaacagaaggggagagaggagagagagaataagcagaagagacggtgacaaagaggccacacacaccacacgcacaccacacacaccacacaccacacacacgccacacaccacacacacaccacacacacaccacacaccacacacaccacacacctcacacacacacaccacaccacacacaccacacaccacacacacacaccacacgcacaccacacacaccacgcacaccacacacaccacacacaccacacaccacaccacacacacaccacacaccgcacacacacactgcacacacacacctgcacacacaccacacacataccacacacaccacacaccacacacacaccacacaccacacacacacctcacacacacaccacacacaccacacacacacctcacacacaccacacacacctcacacacaccacacacaccacacacacacctcacacacacaccacacacacaccacacacacctcacacacaccgcacacacctcacacacaccacacacacaccacacacacacctcacacacacaccacacacacacaccacacacacacacaaaccacacaccacacacacaccacacacacaccacacacaccacacaccccacacacaccaaccacacacaccccccacacacacaccacacacaccacacatgcacaccaccacacaccacaccacacaccacacacacaccacacacaccacacacaccccacacacacaccacacacaccacacacaccacacaccacgccacacacacccccccacacacaccacacacaccacacatacacaccacaccacacaccacacacaccacacaccacacacacaccacacacaccccacacacaccacacaccacacacacacatcccacacactccacacacacaccatactcccatacacacacaccacaccccacacacacaccacacatgcacaccacaccacacacacacacaccacaccacacacacacacaccacaccacacacacaccacacacccagaaagagatcctttaagagctgtttttttctggcccggaaccgtatttcattctccaactctgcagacacagaaaaggcattattgcagtaaaaagtctccccacattatttattgttaatacttacctactttgtcctctctaggtttttacagccttaacttcattcaaagcaggcccctggtgtgggcaatgcagaggttctttgcctgaggagggatgaggagctcagagagctccagcaacttgctcaagattgcgcagcaggttaatggccaagttgggaccaaggatcaagactaccgacttccagtgcagtgggagtctcctacaaaccatgtccaggatcaaagcagacgctgaagggcagaggttttgtttaccctcttcccttcaattactgagtccctaaactccctctttaataaggaagtaacagtgacctagtatatttgaacttgagcaaggcagtggacaagcaggtgcatgatattcccatggtcaagcatgatggaaaactgtgagatggattcaagggccgtcagtagaagactggcacccaaacaattttggtgaatcggtttccacatagaaggatgctttgccccatgattttttattcctaaaatttaatgacttgagcgtctctcccacctcttctttattttaattattattatttatttattagagatgtgaggcttactatgttgcccaggttcatcttgaactcctggcctcaagtggtcctcccgcctcagcctcccaccacagcctcctgagttggtgggattacaggcttgacctgccacatctggcccaccttttctgaaaacgactctcttccctagttgagaccctccctcttaggttgtctaggatagttacttacttagtccaaaggggcactgctagttcccatatcctgaaggacaaaaacctaggaagcctcattaggtgccctgcagtttctggcactgccacatgagggcactgttgaaaagaagctactctgttgcctagaggcagtcccctgagaccatgtctgtaagcgcctggaagataacacctgcaggcccaggcccaggtgcagtctatactccccactatagaaacccgctttattgatccaggcatgctccatttggctggttctccatttgttactccgggggctttgggaaagggaaaagacatctcccacatagctatggtcactccattacacactgaacatctagtgttacagctcttttatttatatacacgctcaaacacaattgtttacacatttaccaacagtgcgctagggtagctaggttgggaccagtttccaggctcagttacaaactcttcctagaagcagcagcctcccaagctcttgctctttctaggctgcactagtgggcagttcttggtttgggactgtacaggaccgttcctcctccagtaaacaccccagttccattaagggaaagtgtctcctctccccactgccttgggaaaggggtcattcttggctcctgcctcccaccgctagcctcctccaattgaaggcaaaggagtcagatccttcctctcctcaccttctgggcaaatcagtgggaaatgcattatttaagatgctatttcccaggactttgactatgcaaggagaggggaatggtttctggccattgtctttgtagcaatagcagttgtggaggggccatttacagcatcctgacctatgtccctgttcaaggcagtgactgcttttcctgcttcctgcttcttggcccttcagagtttccttaatttctgctaacctgcgtctgctcttctagtctttcaacaattttgtaaatttccattggtcttcaaacaaaaacaataccccttctctttagtttctggtgcttgcagaaccctgtctgacaaaccccagagaatcaaagaagtctcttcctttctcacctttaagatgtacattttgggctggccgtggtggctcatgcttgtaatcccagcactttgggaggccaaggcaggcggattacttgaggtcaggagttcaagaccagcctggccaacatggtgaaacccatctctactaaaaatacaaaacttagctgggcgtggtggtgcgcctgtaatcccagctactcaggaggctgaggcaggagaatcgcttgaacctgggaggtggaggttgcagtgagtggagattgtgccactgcactggagcctgggtgacagagtgagagactgtgtctcaaaaaacaaaaaacaatgtgacccaattcattcttcaggagggtagtttgggtcccttgcccaaggcaaatctacacagagagagagagagagggaatatgcaaaactccaaaatgttagcagtgttagccagggtgctgagattattggagtgtttcattttccctttttgttcatctgtgtcccttgaaaattttttttgccatgtctatacactccattgatgattaagagtaacaacatatatgagtgtgtttctttaattgtaattagagaaactgaggcattgagaaaaggtcaataagaccctttttcatgctaaagaagtgagcccctgtccctgcagggactgtccttgagaaggagacttgactggtattctggcactgcctctgctgttatcacccctctggtatgggtgtatttattgacagagccagggctgatatcacagttggctttgttgtatgcatgactccaggcaagtccttgcctctcttgggccctgggtcttcccatataaacaaggaggggatgggactaagtgacctttcagagttctgctgctcagttctggggccttgttgaaggtcattgcctgatggaagcagcatccaggggagaagctggaatcgcagtctctgggtgaaaaggcgctggagatgtcccacattgtcagcgatctctgagctgcatatgagaaaaatccacctccaactggcttaagtaaagaaggaatgtgttggctcatgcacctgaaaaatttagatctagactcaggcttggctggatcctgggaataaaaggctgtcatcaaaactcggtctctcttagtctcttctgttttcctttgcctgttttgccttcaggcaggctcttcctagacaaaggcagcgtggccaccagcagcgtcaggttcacaccttgccaccttaacaccttttcccaagggctccagcagaagtcccagtgttgactgtcactggactatatgaagtgacatgcccatcgctgacctggtcactcagtggagccagggtatagattgtattgattggccagacctagcccatgtgtctgtctctgaagttaggaggtgggtgagtgtcatttatatgtttcggtctaagggttaaggaggggcagttctccaaaggcacatcaggagctgctaccagctggggacaggatgttgggaaggaaagagcccatagaggtccactcaggttcatgtccatctgtgtcagtgaagtgtgctccccagattggcagcagcctcatcactatcatcatatgggagcttgttagaaatgcaaattcacaggtcaagccctacaggcaattctgatgcatgctaaagtttgaaaccagtggatcttgcccctgcttccatcagaatcacctgggttgagagtgggccctactctctcaacgaattttatcaggaaaagggaggggaccagttccagtcattagtgttttttgtttggttttttgtttttgtttttgtttttgtttttgttttttgagacaaagtctccctctatcgcccaggctggagtacagtggtgcaatcatagctcaaactcctgggctcaagcgatcctcccccctcagcgtcctgagtagctgggaccacaggtgcatgccaccatgccaggctaatttttttattttttaattttgtagactacctgggctagtctcaaactcctgcttcaagcaatcctcctgcctggcctcctaaggcattgggattacaggcgtgagccaacacgctgacctgatgcttttaaaaatgttgccccaagtgattctaatggaagcccagcttgaaagaacaactgagctcaaccaaactcttgttctcaactatttctaacttatgaagtggcgataaacaaggaagtggatggtccctctgctgagaacgacggtttattaaaggaacgacttggaagatagcaactcaagccaaggcaaatgaagagacaaagccagggacatataatccactgaactttgtggaatttgaacctggaatttcctaccttatggcaaatcaatctttatacccacacagctgattcagccaagaggaggagaactagaggaaaaaaataatagccatgactgagtgcttactgcaagtatatatcagacaaagtatttatcttatttaaacccacatgaccctgtgaggtaggtaatcttaaatagggatataatcctgtgaagtaggtaatattaaatatcaaagaggaagacaatgaggatcagagggtacattaaatagaccctggtggctgagctaggatttgaatcctgggctgttttgaaaacctttattcctgctccatgttgccttctgggaaaagtcatgctctctagttaggagtagaggggcttgcggaggagtttagaggtgactcctctgattccacacattttttgtttgtttgtttttggagacggagtctcgctctgtcgcccaggctggagtgcagtggcccaatctcggctcactgcaagctccacctcctgggttcacaccattctcctgcctcagcctcctgagtagctgggactacaggcgcccgccaccacgcctggctaattttttgtatttttagtagagatggggtttcaccatactagccaggatggtctcaatctcctgacctcgtgatccacccacctcggcctcccaaagtggtggggttacaggtgtgagccaccacgtccagcctccacacattttaaagaaagagcactagcctgagatcagaacctgggctgcactcacagccccactcctacttagttacatgacctggaacaggtcatttctctagctggggcctccctagctgggatctcagtcttcctttccgtacaacggaagggctttaattgacccctaaggtctttttcatttctggatcatccatttggataatgctatcaggaagtttccagcagttctgctttctgggatcctaggacccagaaataggtcctgggatcctaggacctattttgaaatactattatggtccatcctgaccaggtgtcatagtcagtctgctgattactaaagaattactccctagaccagtcgagggttcctaatttttttttcaaggcttaaaagaccatacagctcagacagaaggtctaacagttgcaattaaatcttggaggactaacaagacactgcagaattttgtagagtctcagaccatattttcatcagataggctgcaaaaatcacagtgccctgactccatcaatattgatcagtgcctactacattcagctttgtgctggggaccatggaagacacggaagtgaaggggcaacaccctagtgccaaggaggagtgccatgggtgggggcatggccccgtactcagcctcacattgatcagggaaatgcaaattaagacaaaatactttttgccaccaatgaaagggttaatatccggggctggcatagatgtagtgaaatgagcactttcatacactactggtagagtgtaaactggcacagctttttcagaggatagattataaaccccccctaaatttttaagtacataactctttaattcagcaattccacttctaagactatcttcaagaaatgcttgctctattcacaaggaagcaaaacaagaatgttcattggtgtgttgtgtgttgtatgtattttttggagatagccaagatagcattcattagggaatggctaaactgggctatattcatgctctggcactttgcagcatttaacaagcacaaagaagatccccatataatgacacaaacaaatttccaagatatatacattttaaaaagcaactctcagaactctcagaagaactcttaggtcaggcacggtgacccacacctgtaatcctagcactttgggaggccgaggcgggcggattgctcctgagctcaggagtttgagaccagcctgggcaacatggtgaaaccccatctctactaaaagaaatacaaaaaattagcggggcgtggtggtgtgcgcctgtaatcgcagctactcaggaggctgaggcacaggaatcacttgaacctgggaggcagaggttgcagtgagccaaagatcacaccactgtactccaacctgggcgacagagtgagactctgtctaaaaaacaaaaacaaacaaaaaaacctggcgcagtggctcatgcctgtaaccccagaattttgggaggccaaggcgggcagatcacccgaggtcgggagttcaagaccagcctgaccaacatgaagaaaccccgtgtctactaaaaatacaaaattacccgggcgtgtagtacatgcctgtaatcccagctactcgggaggctgaggcaggagaattgcttgaacctgggaggtggaggttgcggtgagctgagatcgtgccattgcactccagcctgggcaacaagagcaagactccacctcaaaaaaagaaaaaaaaagaatatatttggttaaacacacacacacacacacacccctatccacccacccctgccacatcctcccgcataccactatgagatgctgcttcatacctattggaataggtataataataatttttttaaaaaagaggccaggctcagtggctcacacctgtaatcccaacactttgggaggccaaggtgggaggatcacttgagctcaggaggttgagaccagcctgggcaacataaggaaaccctgtctctacaaataatttttaaaaattagccaggtgtggtggcacacacctgtagtcccagttactagggaggctgaagcgggaggatctcttgagcctgggcgatcaaggctgcagtgagctatgatcaacctctgcattccagtctgggtgacagagcaagactctgtctaaaaaaaccaaaacaaaatataaagacaaatgttggtgaggatgtggagaaattggaaccctcatatactgcaaatgggaacgtaaaatggtgcagccacttggaaaatagtctgacagttcctcaaatggttaaacatagaatggccatgtgatccagcaattccactcctaggtatgtaaccaacagaaataaaaacatgttttcatacaaaaattcatacgtgaatgttcatagcagcattattataataacccaagaactggtgaatggataaataaaatactgtatagccatccaatggaacattattctgcaatcaaaaggaatgaagtactggtgcatgctacaacatggataagtcttaacaagtttatgcaaaatcaacaaagccattcacaaaataccacgtattgtatgattccatttatatgaatgtccaaaataagcaaatccgtagagacagaaaatagtggttgtcttgagctggaaggggtggacaggactgaaagatgagagctaaggggtgtggaatttctttctggagtaattaaaatgttttaaaatttactgtgaaattggttgtacagctctctaaatatactaaaaaccatcgaaatgtacacttaaaaagggtgaattaggtggtacattaactatatttcaataaaatcttataaaaacatatacaaatatgtacaatgttttcaatgcaacattgtttttaagtagcagaaggaaatagcctgataccggtaagtaagtgattggctaaggaaattacggtaaaatatactaatggaatacaatgtaatgttatgccaaaggcaaaaacaaggaccttttgtacaaactcatgtggcatgatctctaagatatattgcaaagtgagaaaagcactttagcatagcaggttcccctcatgtaaaaaagaggggaaagaacgtccatccctacttggttttcatatgcacagaccaggagtcggcaagctccagttcacatgtcaaatccagtctgccacctgtcttggtacagcagggagctaagaatggtgcttagatttttaagtagttgaaaaactaaagaagaataatatttcatgacacttgaaaatgatatgacattcaaatttctgtgtctataaataaagttttattggcatacagccacattcattcatttatatattgtctatggctgcctttgcaatacaatggcagagttaagcagttggggcagagaccattagcctgcaaagcctgaagtatttacgatctggccctttacagacaaagtttgctgactcctggcctagcctagctggaaggaaatgctggaaactggtgacctggctggctgctctgggagaggaagggacagctgagggatgaggtaagagggagacttctcactggataccctttcagacctcttcaaaagatgtcaacaaaactaaagctatatattcctgcatgtgaacatattaggatgtatacatgtagaaaaatatttcaacagctatccatcaaatggataacagactacttactttgagggaggggcctggctggggagaggggagttaagtggcttcagtagtaaatgtatgattggaatagtttacaaggagaatcacttaatgtatgatttaatgcaataaaagtgcaataaaaataaagagtgcattcataaaacatggccctcattgcactttcttgaattgtgtgttccatgaggttccatgaggtaggctcttcctggggagccatggtagctcctggcatggagcatggccctctgtaggccctaagctggttgaatgagtgcgagggccgggagatgtgtgtgtgtgccaagagtgagggagtgagggagcgtgctcacaggaatgcacagttcagaatgggctggggtgcagcgggatgatctagggtgaagggagggccagagtggcagagcagggacatagtccctagcgcctcctagtccagggccatcagctccccagggtcggcagccgccgtggttgaggagtcgtagtcttttagcctgtcctcattcccctaccctcataaagtctctgattttctttttctccttttacagcctctcttgaaggacattaggggaatctagctaggggcttgtgcagcaccacctgtgcctgctactccctagaactgccttttcagcaagcaccatctgtggtgtcactgctctctgtgggggaggtgactcctgcctgctacccagtgctggaagactccccttcccaaggaccaagcctgtgggggctgcagcagaactgaaaacggatgttcaggcgcccaagaacagcctggctccagggaccaatggcaagagggtgtctcacacatgggcaaattgaggatgcctcagttttgtttggcttgtcctccatctcttctcccagaaacagggcccttatttttatttagggaactctttatgctcactccgtgtaatttgggtggggctgaaccaaccctggatgcaaaattgaacacaagaaacagatctggccaatcagaaaattccatttttctggtcacagtgattggttcagagatgggcaagtggcccaaagttaagccaatgaacgtcagcctcaagatttttgctgatgctatcaggagagaggtgctgtctctgggctgggcttgttacctgcagaactacacttagagctgctggttgacttttgtcaatacatagagcaagccagcctgagaacaaagctaagatgggcagaagtagagctgagaattggagactggttcctgatggcagtgtttacaccagattcatatctacccttggccttttcaattaaataaactcaaaattccctcttttgctttggctggtttgtgtcgataagagtcattgaaaagcagtgttagcagagggaagcttcctgtcagattctctgagcatttcatgaagatttcatttccacccactctgcggtgcacttacaaccctctgctcccagctgtccaggggcagtctgcctctctggcttgctggctctcaacacctctctgagtgagatatccgaccccctaggtcttctctcctccccttggcaacccacccctctaaattccagcccctgaggatccaagcccatggcctggtgttaactcccatcccctttatgactgtaatgtgtcccagacacaacagttgatgttctttaagctttgatgagtacttcctatttgccagactctgtgccagcctcattacatacataatctcatcgaatcttctcaataatgctgttgggtaggttttatgattattattcccattttcaagaatagaaaccagtggcttagggagatgaagtaactggcctgagaccaaacagctgagtcacacacagtgggaggcagggctagacagagttgtaggagggaactaaccccagggcctgtgccccaatcgccacaccagtgcttctaacccaagtgagccccaggatcaccagggcacaggagcccattccagggacccacatcccctgagtgaggatgggaaggtctgggaatctgctttgttaaataccccaggggatactgaagcatgaggtccccaggaccttacactgacagtagccactgtctcccccattaaggactttggcgctagaaaggagtttggcattgccagatctattattgcaggagctgaagctctgccctagctcagaaatgatgacaacgctagacaaacttctttgctgacacagggaaaggagagatcaagggcatgtggataagcaactcatgcctgggaataaaacaaaaatttaaagaataacatcattccactcttcagggggtgggttgtgagtgtctggactctaagaggtaagaggtataagccagggcccaggagaaattcaaattctataggctttcttcatttgtccctgaaaagaaatggctctcacagccccatgaatgaagttcaaagttattattattatttttttagacagagtctcactctgtcacccaggctggagtacaacggtgcaatctcagctcactgcaaccgccacctcccaggttcaagcaattctcctgcctcatcctcccaagtagctgggactgcaggcacctgtcaccacacctaacttttttttttgtatttttagtagaaacagggtttcaccatgttggccaggctggtctaaaactcctgacctcaggtgatccacctgcctcagcctcccaatgtgctgggattacaggcatgagccaccgcaccctgccaagttcaaagttcttaacaaagctttgcacccaacatgagctggttgtgctctcttgacacctggcttttaggcatacctcacctttctgcctgaaatgctgtctgtttccttcccctcctttgcttaacaaacttctgcttatccttcagatcccagcattaatggccctccctctgggaagcctcctccaatcaccaaatctagattaggtgtccttcctcagggctcccttacctcccttaatatgtcttgattgtacctctcatattgtattttatgtgtttaattcaccctgctatactgtgaggttcctgaaggaagggccgtgtctatcgtgttctctattatattctcagcaccagacatattataacaatgagttagtgaaagcttaataaaaccaaaacagaaagccccaggcagttacatgcagtaatcatattgaccactagatggcacacgactatgacgtcccaattgggatgggctgggagaggggcgtgaaattgatgagcaggttggtggaaggaggccggggggcctctgatcttctccagactgacagctggagaccttcgtgatccttaaatttgtatgtgtggaaatctttgttcaggtaattgccttactccagaaccccatttccattaagggttacgtcttcatgctacacattaaacactttttgatgtctctgaagtttcttctctcgcttaccaaagaggtgttttctgttattagtgttgctgttgattgcttgaaatggttttatagattgctttttcttattactcgttaggaattaggtggagtctgtcacttttaggctctgagccaccactgagtctaatcttccactcttcagttgatctgaaacttctgttttttggcttaagaactaacacacacttagacttgtcttcctcttcccttttatcaccaacacaagtcggcttatttttcaacgagtgtatcttgtagaaagccattttttaaaaaaaattatccctggagaatgtcaggataggtgacaagtgttgacctgtacctgctgggcagcaggctaggcttacagactgttgttattcttcccagcataccagcttcccagggccatgatttacatctggacccagcacaatgactaatatataccatgaacattctggtttgctcacaaataattgaaaccaaacatttaaattaaacaatgccaagaatctaaggtagcaagctgatggctagctaatttcctagaagccccaacagtcccacctgttatttttttttttaacttcttaaatgcacaaatttattttttctcaacaaacacacatcttaatgcctttacaacttttatctccccaaatatatcttgcttttctttatacatgctgtatacagagttgttttctttatatttagtagttattgcttttttgtgcccttttgggtcctgaatttacacatcaggcatagagcttgggacaggaaagagctgtgaagcaaattcctggaagatcaaaccccttccagcatggccaggtagcacagctgagccagggatgatggggccatattgggtttggctctgccttgcagctggcagtccaaacactgaggacatgcatatatttctgcaggcctcactatggtcatctgtccaaaccccagaatccagagactcaaaacgaaatacagtcatacagtaagatatgtgcaaggtttcagggagcccagcagccagaccttacagctttagctcaatttagacaaatcaagcaagtttaagaaatattccagaagtagcagttttatgaccttaaaacatgtaataggctgggcacggtggcccatgcctgtaatcccagcactttgggaggccaaggtgggcagatcacttgaggtcaggagttcgagaccagcctagccaacatggtgaaatcctgtttctactacaaacacaaaaattagccaagtatggtggcatacacctgtagtttagctattcggaaggctgaggcaggagaatcacttgaacctgggagacggaagttgtggtgagctgagatctcaccactgcactccagcctgggcaatgagagcaaaactccagctcaaaaacaaaaaacaaattaaaaaaaaaaaaaaaaaaaaaaaaaaaagtaatagagacaatgtaaacctgtctgtcagtagacccaggcaaaaacaattatatttaactgacaatcctgaagcctttccaattttctttttctttcttttttttttttttattgatcattcttgggtgtttctcgcagagggggatttggcagggtcacaggacaatagtggagggaaggtcagcagataagtgaacaaaggtctctggttttcctaggcagaggaccctgcggccttccgcagtgtttgtgtccctgggtacttgagattagggagtggtgatgactcttaaggagcatgctgccttcaagcatctgtttaacaaagcacatcttgcaccacccttaatccattcaatcctgagtggacacagcacatgtttcagagagcacagggttgggggtaaggtcacagatcaacaggatcccaaggcagaagaatttttcttagtacagaacaaaatgaaaagtctcccatgtctacctctttctacacagacatggcaaccatccgatttctcaatcttttccccacctttcccccctttctattccacattgtcatcatggcccgttctcaatgagctgttgagtacatctcccagacggggtggtggccgggcagaggggctcctcacttcccagtaggggcagccgggcagaggcgcccctcacctcccggacggggcggctggccgggcggggggctgaccccccccacctccctcccggatggggtggctggccgggcagaggggctcctctcttcccagtaggggcggccaggcagaggcgcccctctcttcccagtaggggaggccgggcagaggcgcccctcacctcccggatggggcggctggccgggcggggggctacccccccacctccctcctggacggggcggctggccgggccaggggctgaccccccacctccctcccggacggggcggctggctgggcagaggggctcctctcttcccagtaggggcggccgggcagaggcgcccctcacctcccggatggggcggctggccgggcggggggctgacccccccacatccttcctggatggggcggctggccgggcagaggggctcctcacttcccagtaggggcggccgggcagaggcgcccctcacctcctggacggggcggctggccgggcggggggctgacccccccacctccctcccagacggggtggctgccgggcggagacactcctcacttcccagacggagtggctgccgggcggaggggctcctcacttctcagacggggcggttgccaggcagagggtctcctcacttctcagacggggcggccgggcagagacgctcctcacatcccggacggggcgacagggcagaggcgctccccacatctcagacgatgggtggccgggcagagacgctcctcacttcctagatgggatggcggccgggcagagacgctcctcactttccagactgggcagccaggcagagaggctcctcacatcccagacgatgggcggccaggcagagacactcctcacttcccagacggggtggcggccgggcagaggctgcaatctcggcactttgtggggccaaggcaggcggctgggaggtggaggttgtagccagccgagatcacgccactgcactccagcttgggcaccattgagcactgagtgaacacgactctgtctgccatcccggcacctcgggaggccgaggctggcggatcactcgcggttaggagctggagaccagcccggccaacacggcgaaaccccgtctccaccaaaaaaatacgaaaaccagtcaggcgtggcggcgcgcgcctgcaatcgcaggcactcggcaggctgaggcaggagaatcaggcagggaggttgcagtgagccaagatggcagcagtacagtccagctttggctcggcatcagggggagaccatggaaagagagggagagggagaccgtggggagagggagagggagagggagagggagagccccacctgttattataataatgatgtcatttggagaatcattttctgtggaaggtaatgaaaacctcaatttggcagaaattcagtaacttagagcctgtaagaagttaggaattgggtgttgccctaatggggttaattcttgattaccctatagatgctcacgtggctacattaacctctctgtgcctttgctttctatctttccagtggaggcagcaagcctgccagggctggcctgagaaggggaatttgagcctcctctttgtacatatatttgacttggcactggttccaggccagtgtagccaccataagcagttaccaaggcctctggcaatcttgctttgtccggctccccagccgatgccagtctctgcccattacacccttcatatctgaacagtttgggaattatttagaaacggccttatttgtagtcctataatccagccaatatgacagccataaagattgctttgtcgttccttgagctgttgattgaagggtgtggagggaaacagaaactggattagtcaagggctttgccccaaggttgcccaaagtggtacactggtcgtaggggacaggctagaacccagggctcttggcagcccagatagtacattctccctcctgtgggctatttccaagagctgtgtgtgtctctctgtgtgtgtgtgtgtgtgtgtgtgtgtgtgtgtgtgtgttggatagagggggtagttattagtcattcagccatagtccttctctcaacgaggatgttgtggacggccaccaaaatgggttcagtattaagcttcgtgacattagatttggcagttatttcttggctatgacactaaaggctctggtaacaaaagaaaaaatatacatataggactacatgaaaatctttaaattttatgcaccaaaagacactatcagcagataagaaagcaacccacagattaggagaaaatatttgtaagtcatacatttgataagggattaatatctagggtatatagagaactcctaaaactcaacaaggaaaaaacaaacagcccaatttaaaaataagcaaagaagccaggcgcagtggctcacacctgtaatcccagaacattgggagatggaggcgggtggatcacttgaggccaggaatttgagaccagcctggccaacatgatgaaaccccgtctctactaaaaatacaaaaaagtagctgggcacggtggtgtgtgcctgtattcccagctgcttgggaggctgaggcaggagaatcacttgaacctgggaggcagaggctgcagtgagctgagatcattcaagtgcactccagcctgggtaacagagtgagactctgtctcaaaaaaaaatgtgcaaagggtccaaatagacacttctccaaaaaaaagatacacacatagccaataaacacatgaaaagaagctcagcatcacaaatcattagggaaatgcaaatcaaaaccgcaatgagatacacctcacacccattagtacggctactataaaacagagaaacaaaacccccataaaatagtgttgtcaaggatatggagaaattggaaccccttgtacactgttgataggaaaatacaatggtgcagctcctgtggaataatatggaagttactcaaaaagttaaaaataaaattgccataggatccagcagttccacttctgggtgtatactcaaaagagtagaaagcagtctctaagagacacttgtatacccaggtttctagtagcagtattcacaatagcgaaaacatggaaacaatccaagtgcccgttgatggatgaatggataagcaacatgtggcatgcacatacaatggaatatttttcagccttaaaaaggaaggatgttctgacacacgctgtaatgtagatgaaccttgaggacattatgctgagccagtcacaaaaagacaaacactgggccgggcacggtggctcatgcctgtgatcccagcactttgggaggctgaggagggcagatcacaaggtcaggagttcaagaccagcctggccaacatggtgaaaccccatctctactaaaaatacaaaaattagctgggcatggtggtgcgtgcctgtagtcccagctactcgggaggctgaggcaggagaatcgcttgaacccagaaggcagaatttgcagtaagccaagatcacaccactgcactccagcctgggtgacaaagcaagattccatcttggggaaaaaaaaattaaaaaaaaaagaaagacaaacactgtatgattccacttatgtgaggtactcagagtggccaaagtccttgagccagaaagtagaatgggctaggtgtggtggctcacgtctgtaaccccagcactttgggaggccgagggggatgggtcacttgagtccaggagttggagaccagccagggcaacatagtgagaccccgtctctacaaaaaattgaaaaaattagccgggcatggtgacacatgcttgtagtcctagtttctcagggttgagatgggaggcttgcttgagcacaggaggttgaggctgcagtgagcagtgattatgccactgcactccagcctgggagacagagcaagaccctgtcacaaaagaaaaaaaaaaaagtagaatggcggttgccaggggctaggagtaggggagaattaggggggatattgttcattgggcaccgagcttcagttttataggatggaaagagtcaatggagatggtggtgatggttgcacaatattatgaacgtgtttatcaccattggactgtacagttaaaaatggttatgactatagtttttatgttatgtgtatgttacaaaataaaaaaagttctaacaaatggattcagtgctgagcccactattattgggtgggtgggtgggcaggtggtgttgatgggatggaacaagaagaaatgatacccagtccctggccttagcctctggtctcattaggaatgcagagtgataatcaaccaagaaaacactggtaggcagcaaggctccttgtaacgccagtgttagctcaggtcacacgtcctcagagattaaataaaattggctagtgccatatccctcctcatgtgggcggtctaatgccctccaaaggtttcctcatgttcccaggggcctctgcctttcccatgtccccagaccttgggttcctgccttccatgaggctgtttcaattccagggtaatgggaactgtctttccttgttttcctctaaaactctccctccagaggttttgtgtgtagccaactctgccagtggtttggtgtggtcaataaggcaagcattgataaccgaaatcctggccagccccaggcctggagttccttatgccaccaagtcctttggccacctctcttcacagacctcagctctccatttattcttgtttggttttggttttgtttatagagaaaggatttcactcagtcgcccgtgaaggagtgcagtggagcaatcacatgatcatagctcactaaagcctcaacctcctgggctcaaaagatcctcccacctcaacctcccaaagtgctgggattataggtgtgggccaccatccctggcccctacctctccatttggatgcctggtctcctggcccttagagtccatatttgaggtccacccccaggaatgcagtttccctcaaggtatcattcggagcaatggattttccattcccatttccaaagaactccttgcacattctaagactcattaatgtgatgtgctaaggaagggccatctgccttttgaattttgtaccatgtgcaactattatttattctcaaagagccaaatacttttttgaaagacactttcttcttaggatctcaccttttactggaaagaaaaaacaaaaacagctttgtaattttaatccattttatctctttctcctatcagcctctccaaggaaggagatagtatggagatttgtttttccttctattggaattatgccttccctcttagaaagcagaagccattgcagtgagtttgagtttgaaatgacattattttctgactttgccccatttgttatgtgcactgtcccattcattcattcaataaacaaccagatgctgtgtggctcagtgggaggtagagtctgtgggctggagtgatccggggtggcttcatgggtggggtgggaattgacttggaaaatcatgagaggggaagggtagaaattagttcagtcaagaaaaacagcagggcagttagaaagtaggcgtatagactggtaggtgcagggaatgaataaccttccattcaatcaacaagcattgctgcggctccacacagtcctggccacgtgctaggcactgtgccagagactggcaaatggtcgcaggcagttccaatagaggggaggcatgggagaaacacaggtcatggggagagaggctgccaggagagattgacatttcagctgagacaggaagaatgtgtgggtgaggtgagaagctatgcttcaaggagagggagcattgtttatgaaattcccaagtcgggggagcctgatgaggaaatggaggaagtccgaccttgcgagatgcaagagctggaggagtgaagtgaggaatgaggctgggaggggcaggggcagggcaggtgtgtgtagggcgggtatggcagggcaggcgtgtgcagggcaggtgcgtgcaggtcgggtgtgtgcagagcaggtggggcctcggaggtcccagaaggaggaagcatgtaatcctgagggtaggagaggctgagggtttttttttagcagcaaagctacataatcagaactgggctttcgaagggcacctgggctgggcctggacaatatgctgaatggggagaaatgggaagcagagggcccatttgggaggggattgcagcagtgcagcagaaccttgacaccttacaggctgtgggttggagaagagacctgtgctagaacaagagtaggcggggatggaacttgggacctcacagtggggaaggcagagacaagaggacttgcaaagggcagcctctgagacaggtcagggtggtgacagggctcctgcttgggggaacctactggatgggacctgagtcaccaaagatgaatcctcccttctccaaaaggagtgtggcaccataggttgtcccaagggcgagacaggtgctactggtgggcagtgtccaagatgggcatgacagagttgactcacctggcagaaaagttcatccctttctcaattccccttcagttcttcaaggagaaagccttgaatgggtgctagactctccaacacctctctgacatttactaacctcccttttctataaagagagagcaagcctcagtctcagagccttcagcaggcaacagtgtctagctgggatttgataacatttcattgcatgtatttttatggctgccttccatttatggtcagtgatatcaagtttccaattatggcagtgatatcgagtttcatttttcattaaggcatttaagctaagggggaaaatagaccacttttaaacatatattaagtaaataatggtacaagtggtctagagctatggcaaaaaacaggaggggaggactcagatgacagaaggttgggaaaaacttggatagtaaaaagagcactgggtttggagtcctgaaactgtgtgtaagcacttatgtcctcctcctcccagttgtgaggactcgttgacatccaggatgggaaagggctccaggaaccctggggcctcttgggacattccttattgtcagaataacaacaggaggcagtctccaccctgatcctcccactgggtcctgggcatgaaggtgggagttagcagtgtggggtaaggttagtgtccacttcattctagtaacttttttggttcataaaagaaattaagcctgaaaagcaaatctccccaaagataaaatattcaaggccgggcatggtggctcatggctataatcctagcactttgggaggccaaagtgggtggattgtctgaggtcaacagttcgagaccagcctgatgaatgtggtgaaactccatctctatcaaaaaaaattagctgggtatggtggtgtgcacgtgtagtcccagctactcgggaggctaaggcaggagaatcgcttgaacccgggaggtggaggttgcagtgagctgagattgtgccattacactccagcctgggtgacatagcaagactccgtctccaaaaaaaaataaaaaataaaaaaataagaaaacataagttgtccaaacactgttaggtatactttgctctcctgaagtggtgtctaaaactgaagccacaggaaggtttagaatgtgaggctgtcgccggtgtcagcttggtactcagtacagttcctgagcaccaggagcagggcagtctggcattggtcgccaaggggaagcgacctctctgtggcctggggagttgctgttgttgcaagactgagaactcagtgctcccgttcctgggggcttcctcttacaaactttcgatcttgatgttggtgggtgtgttcctgcctactccactccccaggccccagtgcccgggagcttgaccagcatgggcactgccagactgtgaaacaggggatttccttcagggcatttctgcagtcaccacagttgaatctctctctttgtttacttcttattgccagttgtcacctactcctggaaggtaagctgaatgaggacagagccttgttctcactggtgtgcccaacaccttttgcagtgtcttgtgcttaataaggatggttgaagaaacaaatgaatgggaaggaccagaatgtaatcttaacgttcagcttcctcacaaggccccagacagactccttagagcatgattgcaaaatatggaattgggagtgagttggaaattggctttttcttgcccctgtgacctcttaatctaaaaaaagtcttaaggaatgaatccttttaaaatgaaagtttaaggcatttaaaattgctctgagttcaaaaatctaaagcaatatttaaggagcattggtatgctttcattagttacctaagtcacaaaaatgttccctttggggctggatccggggaacgagagggttccacatggttccatgggacagcgcagctggaggagggtggtttgctccagttcactctggagaggtaacattagggctgaccagtgcctaatgtccaccctagctcaccaccactttgctttcaacggggacacaaatcctgattcttcccttagtagccatgggacattaggcaagtcacatcacttcctccaatggggataataatggtacctatgttatgaggaactggggaactgttttaagaattaaataaatgcgtgcatggaaagtccttcaaacagtatcgtccatagtaggtgctcaaaaaatatcagctttaatcattatttcttccatttttcctttctgtaatataatgagacgaattccaagaatataaaagcattgcaaattattttaagggaaaataggatttatggtctctaacaaataaagtgtacatttagaagggtgacgtaaattccaagagacaaatgttgttatcagtgagttggggattttccctcctatagtttcagcaactttcctaaagatgtatgatctctgtttaaaccccaagcgctcaaaatgttagaggctttactgaagtcaagcgtgggtgacctctgcttttaatcaacaggcaaactgaagagactccctaaaatttaatagctatagctccatttgttttttttaaatcaccaaattaaaagtaaaccacagatttataattattgcctgaagtattacactttgaaatgtaatatactgattatgataacttgcagagaaaatcaacttatacataatggatttttatgtccctaaattactgaaattatttttcacctaaaaagagattgcacatagtttaattttcccttaaattttcattcaccgcaccccatctcttccaaatgcaacagaatctttttccccaaggtgtcaatattagagggaatcataatttctactctggaacccttccctcttccttggaatttgcttcccatgactgcacacactcaggcccctcttctctctcgtaaattcagctcccagctgaagaaaccaaaataccaggacgcaaggacagggatggtctgttctgaggatcttcagggaatgagctatacccatcttcctgtcaaaggcatttcccaattattctcctgaaagaccaaggcagtctcccttctgggaagaaggggagagggtgtggatacacatgcctcaccccctgccgcctgttaacatgtagctgaattctagagtcgtaacttgatgtcctgcagtgttaattcccattttactgatgaggaaagggtaggtggctgtagggtgacattgtataggccatttcttcaacaggattttgctcggttctgttttgagcacctgcggtggaccaggccctgctttaggtgctgtccacacaatgatgagcaagacagttctacatctccctggagcctgaatatctttatcggtatagtggggacaaaaatcccacaacaatgacttggcccttctcaaggtgttgtgtggagatcagctgagctaatggaggagaaagtgctttgtaacatattaaggcatgataccaacatgaagaatgatcaggtatagagtgaaagtagatgttaaaaaagaaggcttgtttttctgcactctttattaaatgataacaataacaaccactcattgtgcacctactgtttgccagccattttatgcacattcttccaagacctcacagcaacccccaagagagctgtatgatctcttgcaggggccagggcagcttgccctaggtcacgcggctcgtgtgtcttggagccaggatttcagccagcacgacctgcccatttcccttttggcagactctcatgtaggctgtggggcagggcctaggtatcctggagagaaggaccaaggaaaggctgaaggtagaatggaagaggaaggaagaataaatgcatctccttcaggatcacagaggcaaagatgagccctgggggtgccagggaacttctcaggaaacaggcagtcagggacaatgacttaagggtttggtaagagtttctaaacctttgtaacttcctcttattggttcttccattattcaggccttctgcctatgggaagaagcaatgaaacacagcctctgtctacccatatgtattaagtgcctactatagtgccaggcaggcaaaaggagatgggctggggagatgtcttttcagaggcaggaggaagggaagtgttgaggagtcctgtgatgcacccactgtggctgagaatgagaactccagaggactgagagcatgggggtggctcaaaagaggaacggaaagcccatgagtctctagggccttcagagaagaagaaaaggggaacagggaggcataagcccaacctggtcctgagctgggtgggccaagaagggcgaggacttggccctgaccctgccacaggctgtcacagggttgaaattgggcttgggctgggctatgtcctccttggccctccaagccctgaagttcctcttcctcctccctcctccctcccctgctccacaagcacccactcttgcattcttggggaatcaaaggctaaaaataaacagttgccaccagactctgggcccaggggggaatgggttccacaggagtcctgtggacagtgggttgaggctggggcgaggggacggaaggtggggggacagctaaaggtcttaggactcccccaagtggtgatgcaaatagtccccccaccccccaccctggctctggaagagccaagccttctagccttcaactccatgaccttctacagctagggctatttggatcctgggcaatgtcactgtgcctgctggagagatagagcatgtggcaaaaaatagcttcacctccttgcagtattcctacccataactggactcagagagtctttatcagtccaaaggcattctcccagtggagcaaaggtgcttttctgggaaggcagaacccgtgactcctcagcccagagaatacttagtggggttctccttaccgagagcatcgctggaatcctttggaagagagtccagtttttggggtggaaggcggggtggggagtgggagccgatgtcaactagcagcacacatctgtcatctaagaaatcttcttgggtcttagctgtcctccactcttctgtctgtgtcactaacaaacacaagtccacttccaaaacttacttgatggattcatggaatgttccaatcgagtaattgcccagacttttgtctctaggaatccaggggctgggagaccctccctggctctgtgttaactccatatttagccataaagagactgcacctccagggtcaaggaccctggtgcctctgaaaatattaataagaacaataataacaacactagctaccatgcatggagcactgctgatgtaccaggcattgtggtcatgactttatgtggattatctcccttaatcctcacaacaacgcatgttatagtttcatacccattttacaggtgggaaaaatgagacctggggagattaagttgctgccatttgcacacacatagtcagtgatggagcccagatgagatggtttataacagtctgactccagatcccatactctgagcctctacggaaaatgttctgtttcagatgaaggacccaccagggaacaggaaagaaaggctcaaggccagtggcaagagtccccagaacatttccctggagaactttcactgtgccctgtccactgctgtgtccccacaattgcattctgcaatcccactagcaatggcttggtcagaggtcgagccaccctgacctctcgggcccttgcatacgcagttccatctgtctcaaatgcccttccctctgcgctgaacttggccaactcctgcccagattaatagctctttcctcagagaagcctgacctggccagattcagtctcaccacgccatgtaactctgtcttacaggctctagcacagttgttatggaaatgtgtgttagaatttatggtatctgtctctgaaaggaatgtaagcaggaaccgtgtctatcttgttcaccgagatattcctgcaacttagcccagtgcctggcacatagtaagtgttcagtaagtacttttgaaggaaggaaggaaggaaggaacaaatgaatgaatgatttgtcaaacgttgactggatgattgaaccagtgatctcaaatgcatttggctgatgggatgtagcagccgttgtgcagagcaggagggaggctgaggggaagatgctaccgtgagagacagtgcctccctgggggcggtgacagagagagagaggaaggaactgcatggcctgtgatgaactagattaccccaagactccatccaaccttgaaatgctgttacttgatgtgaggatgggctggcgtcccagatgtcaaccctttaaggtcatggtcccccaggccctcctcgtttacctgaagaatccattggagtaaatccgaccctatgagttctaaaccttgtgaggaaagagctgcataaaattgctttgaaatggtcatggtggaagctcctccaaagcagctcattctggagggtgggattcctgagggcgtttgtttctacatcacatgtttcttttatgatttctccctcccttaacttcttccccccaaaaaaattacctttgtattaagagtaacaaagccagccgggcatggtggctcacgcctgtaatcccagcacttttgggaggccaaggcgggcagatcacaaggtcaggagtttgagaccagcctgaccatggtgaaaccccgtctctactaaaaatacaaaaattagccaggtgtggtggctcacgcctgtaattgcagccatatgggaggctgagtcaggagaatcacttgagcctgggaggcagaggttgcagtgagccgagatcgtgcattgcgccactgcactccagcctgcgtgacagagcgacactccatctcaaaaaaaaaaaaaaaagtaacaaagccaagttattaaggacgtcttcaaatatttggggggtagaagtgcctattctttaaggagtttctggttgcagagaatgaggaaaagggaggaaagagaggctgggagtgagtggctgagtcggaatgacaataccactgatgacttgtttttcttattttgacaattaacatgcagtaaaattgacttgtgtgtgtgttacatttttttttttttttttttgaagagccttgctgcagtggtgcaatcttagctcagtgcaaacttcgcctcctgggctcaagcaatcctccacctcagcctcccgagtagctgagattacaggtgattgccaccatgcccaggtaatttttgtactttttgtagagatagggtctcactatgttgcccaggctggtctcaaactcctgggctcaagtgatccacccaccttggcctcacaaagcctgggattagaggtgtgagctgctgtgcccggccagttctacaaatgttaacgtatatgtagatttgtgtaaccaccattgcaattaggatataaatcagttccatctgtccaaaaaactacctcgaattgcccttgatagtcacgcccttctcccagccctgactcctggcaaccgctggtctgctcttcatcgccctagctttgtctttcaagaatgctgtgtaaatggaatcatacaacacataaccttttgagactggcttctttcactcagttgttccatgtatcagtggtgagtaccattttactgctgagtaggtttctggtggtggtctagtagacaaaccacagtttacttacccattgagcaacatttgagttgcttctaatctttggtgattgtgaatagagctgctataaacatttgtgtacacgttttggtgtgcatgtaagttttcattcctctagggaaattacctaagaatgagatggctgaattatatgttaaataaaggtttcactttataagaaactcccgaactgttttcagggaggctgcagcattctgcaatcccactagcaatgtatgagggttgcggtcagtcttcatcctgccagcatttgttgtcagggtttttggggttttttttttgtttgtttctttttaaagccattctgataggtacacagtggtatctcatccgggttttgttttacctttccctaatggctaatgctgtggaatatcttatcatgtacttatttgtatcctctctggtgagctctctgatcaagtctttgggccatttcttagttgggttgtttcatttcttacattgagttttgagggttctttttatgttccggatgctagtctttcgtgagatatgtgatttgcaaatatttttccccagactataacttgtctgttcttactctcagtggtctttgtcatagagcaaacatttctagttttgatgaagaaaattttaatcaatttttaaatttcatagatgatacttttagtgttacatataagaactctttgcctcatattatcatttttgatcactttctttgtgccagcccacattgcataattatttaatctttactacaatcctatattgttaatgctattcttatataacctcataatacagatgaggaaactgaggcacagagagcttaataattttcctgggactcacacagcattcactggcagagctgggattcaactgcacgtcagagcccacccttgtcaccactagaatcaggttgacaccctgcccatagaaacccttactggaaagccagcagggaaaggaacatttgctgcttcttgtcatttgggtctcagcttaaatgtcacctccacagggagatcgtccctggctaccccatctaaaataggccctctcttcccctcccctccgttttcacctctcccctcttcccctctttctttcccttcttaactgagaatgagtctctccatggctcttttcattacctgcaatttgttagttttcttctacaacttgtgttcttctacataatttcttccttccccacttaaggtcagctgagtgagagcaaggaccttatctttcacctctttatctccagcttctgtgcctggcacagagtgagtggtcagcaaatatttgctagtgctgttagtggatggataaatgaatagatgaatggatggataagttgcctcagttggggaaatttggcttcttgagcaggaagaagctgccacctaggaaataatcaggtcctagctggaaagaatggaaaggcatcttccatatgaacatatttgtttgtgtatataaacattatgtacgacatttgtgtttaaaaaatagaatattgtaatacatgtctattctaatatatgcatagtctatctctggaaggatacaaaagaagttggtgtactgattgccttctcagggtagagctggactaggatattggctacaatattaggatgagaatgagactcacttttcactatataaccttttattcatcttgctaccctgggcatgtattgcatattcagagcttatatttcttttaacagtaataatgatataagatttctttccctgggaggctggcaccggagcaagccaagaggttaatcagatgaagttgtttagaagacaattaacacctctccaaccagcagcttctttgtaggaactaaggcaaggtcaatcttaatgcagaaaaggttttgtaaggctaaatggagaggcaacatttattaagtcattactaatgagcaatgcttattaatattggaatataatacatgcttattgcaacaattcaaacttaaagatgtatctgaagcaaaactaacaccttccaatccaactcctttgacacattgtaattagaaatttgattttcctacttttatttgataaagtattcagtgtcatttgggtatatttattgtctgttttctataaaaatggtatcaaaccatagacattattcttttctgtttgttttttgttttttgagacaagacctctctctgttgtctgggctggagtgcaatggcacaatcagaactcgctgcagcctctatctcccgagctcaggtgatcctcacctcagcctcccaagtagctaagactacaaaggcacgccaccaccatgaccagctaattttttctaatttaaacgattttttttcagaggcaaggtctcactttgttgcccaggcttgtctcgaactgctgggctcaagggatcctccctgcttggcctcccaaaatgttgggatgacaggagtgagccactgcacctggccgacactattctttaacatctttctttcactccacacattttggagataattttaaggtgatacacatggagctacttcatttgttttaagagttacataatggcggggcacggtggctcacgcttgtaatcccagcactttgggaggccgaggcgggtggatcacaaggtcaggagatcaagaccatcctggctaacacgatgaaatcccgtctctactaaaaatacaaaaaattagccgggcgttgtggtgggcgcctgtagtcccaactacttgggaggctgaggcaggagaatggcgtgaacctgggaggtggagcttgcagtgagtggagattccgccactgcactccagcctgggtgacagagcgagactctgtctcaaaaaaaaagagttgcataatgtgcaattgtattgatgggagcaggatgtttctagtttcttgttgttacaaagatgttgcaatgaatattcttgtatctagctagctagggagcttatgtgttattactttcatttctgaaagttgtcacatattttttgtcataatattttggaaaaatttttctacaaggctgtaattttttacaaccaacgatggatatgatagagttggttttcttactctgccatcagctataaacgttaccaatctttttgtttctgccaatattagaagacatatgggaactcattatttaatttttatttccctacttatacatatgcttattggccattttcatttcctcttctgtatactgttcacattctttgccaagttttccgtcgggttattcatttttccccccagttaatttgtaggagtgtgttcatgccggggtagtaagcctttgtcatatgaagtcttaatgttttatcctggactctcatttatcttttgaccttgtttgtggtgtcttctgttaaacagaagtttaaaatttttatgcaatcagatctctctattttttcctttatggctattaataaccacggatgtttgtgtaacccggtggttttcatactgtgtttcctaaacttagggtttcatggggatgaatggatgtcaagagggtgggggtgaatggagctgctggctgtcaggaactcaccatttccccttcctctattttttattgatcctttacatgctaccgctaatactttagtggaggagaacctgggctctggagccagaattcttgggcaaggcacctaacctttctgggcttagtttcttagtttctcagtctataaaatggggattgagaatagtgcctccccctagaattgtggtgagcctccagtgagttgatccatggaaagccacctcttaattagcacttaccatgtgctcgacactgtgctaggcaatatacatatatatgttctcagtcagtcctcacagccacctctctgcctgagaggccagcaggattattcttattttacagaggaggaaacttaggcccagaaagcctaggtaacttgcctaaggggacaaaggtagtgagtgatgaagctaagatttacaccctggtttctgcatgcctttaagaccttggttgttatcttgtcctctctccttaccacattgatatttattgagcacctactatattccagcccagtgctaagtgctgaggagacagcagagaatctgacagtctccatttcttgatgcttacagtctagtcggtgaggcagtgattgacaatcagacaattgcaaattgtgggtgtcattgtgcactgtgtaatgagagataatcacaccaattgtgatttcaagctggggaatcaggagaggcctttctaacaacattctgtttgagctgagacataaaggatgagtagggaaggccagtttgaaactgcagcatatcaaatgggtgggctctctggcggagaatgagcttggcagtctccaagaatggaaagaaggtcaatatggcaggcaggcagtaagtgcgagggcagtagatgccagggcatacaagccccttgtgggcgtaggtgaaactttgaactttattataaatgcagcaggaagccatggagggtttcagaaagagaatgctggaatctggctgtgctttaaaaatatcactttgtgaatatgtgcgtacattacggcaattctactcccaggcaggtaggtacccaacaaaaatgcacacttatgtgcgccaaagaccagaatcttaacaactgccccctttgtaatagccccaatccacaaacccctcaaatgcttctcagtgcttgactgaataaatgatgatatagtcacacagtgaaacactatgcagcaatgaaaatgaataaattataactatacacgattatatagatggatctcacagtggtaaatgagttaaggcagacataaaacagtatacatgatatgaatccatgtatataaagttcaaaaatagaggtgaaactaatctacagtgttagaagtcaggataatggtagccccgggggagatatggaagtgacaaggaaggggcatggggcgggcttctggtaatattctgttcttcatttgggtgctgattacgtgggtgtgttccatttagacaaacccatcaagctgaacatttatgatttgtgcacgagtctctctgtatgttcctttctggccagtatgtgagtgttgaactagaaaggtggaagatgcagtcttggagagacgaggtatgggctgttgaaaaattcaggtgaatgatggctggctagagggatggtaggggccagggagacctgaggacggagcagggacatgttttggagaaaagctggtgagggcatcagcagtgcctctccacttctggcatgagcacctgggaggtgtcagaactaagatggagaaggtgggcgaggagcagctttgaagaggatggcagaacccaagaccttcattttggacatgtaaactttgaaatgtctccaaaaggcaacatcacgggagcagataggtgtctggtgagacttcatttaaaaaaaacaaaaaaagattctgctgcttaagagaaaaataaagtttgaaaaaaagttgccaccattctggcaattttttcttttacaaagcactttcagctccattatctcattctatttaatttcatgacaaagattcttgtctttgaagtgtgggtgggatgaggggaatgtgatgtctttatgtagaaattagagagatattcatgtgtgtgctgttactggaacacgctatatttatccattaaaagagagcaggcctgggatgggagcctgagctaacccgtggagggcatcagccgtgatgagaaggctgattggggttctgggagtttggctctcactgcagtggggctgagccaagcagtctaagacccaaatgtagtgggcagagatgctttccgacagccttgggaccctggggacaaggcacaattgctggagatgtgggctccattaccttctaattcagtccctgtccctgcctccccctgaggaatatggatcacacttctcccctgcttacctcttccaaggctccccattgtccccaggaaagaatccttagtcctggccatgaggaggctttgcatctctgcagcctcatcttttactctttttatgggttctttctgttcaagccatgcagggctttctttctgtctattgagtgcgctgcattcttcctaatctccaggccttttgcgggcttttttctgtgcctgggatacctggtcagtcttctttgtacttacctgtatgcatccttcaagcctcaggtcaaaaccattttcgtcaggaaggcttctgcattccctgaacagcctgagccctgccctactcactcaggtcacccagcactgcccttgatctgagccctactcctctttcagcatctgtcttccccatcagactgtgagctccagggcagtggggactgtgtctgccttgtcccccccagtcagcctgtgtcctgctccctagcgttgggtaccaaacacgtcctcacagccatgtgcttttcttgccctctgggctaaactgataaccttgaagctgggcatccctttgtccacatccccaggccccagtgagactgagcgttcactctgcactcaggggcttgtctgtagatttgcaaaatcccctgaaaatgctcatgaccataactgactccacaattactttttcaacagaatccttgggcacaatttttaggcagattagaaccaaaacctgggggctgggcgctgtggcccacccctgtaatcccagcactttgggaggccaaggcgggtaaatcacctgaggtcaggaggtcaagaccagcttggccaacatagtgaaacccctgtctctactaaaaaattcaaaaattagctggccgggatggtggcaggcacctgtaatctcagttactcaggaggctaaggaacgagaattgcttgaatcttggaggtggaggttgcagtgagccaagatcgcaccactgcacttcagcctgggtgagagtgagactctgtctcaaaaaaaaaaaaaaaagacaggagacaaaatctggacacccctcctcccaccaaaggaccaatgagggtcagactcactaaggccaattcagtctgaaataacctaatcccaagaaggtgtccagtgattgtgtgggcagcgacgctgaaaaaagaatagccacagggcatcgttaaaaaccatgtcacaaaccttaaaaatatgaacatcctttgctgcaggaatttcacctctaagaattcactctgataaaataatgcatgggagcagagatgaatttatgaggctgtttcccacagcattgctcatcacagcgaaacattggaaaaaaacaagatatgcaacaatgagagactggttgaaagtggagacacagacaataccctgccaccattaaatgtgatgttgtgcgtgtactttaccgacctggagtcaccaccatgacacacggtgtgtgtgggtcagaagctgttcagtggcaagtgacagaaatccacctcaaaatgggaaaagcacaagggaggatttgttgttagctcatgtaatccagaggagagttggacaacacagttcggaaggaccacagtgtggccagggccaaagaacacctggggtctggggctcaggcagttccaagaccttctctccatctgctgtgtttgcctctccctgtgtgtcagcctcattttctcattgcagaccagatagtggggaatacattttgagacataggaaagtatatacctgaagctgtctctagccctcaatccagaactcccaagcaaggaatagactggccaccttagttcaattacccaagtctgaaccagtcaactgtggacagggtagccaggcactgtgattggcccagcttgagtcaagacctccctctggaccaaacaactaagaccagggcgcagggtctctttgacctaacatgggagttcttgaactaaacagagaaggcaggaagagtagttctgggaaagggtacagggctgataatctgggttatcctccacctatttttgagtgagatggttaacaaaatgacataccagttttgttactgagatactgttcactcttcattgtacttaccagtatgcatccttcaagcctcagctcaggcgggcttcttcattccctgaacaggctgagccccaccctgctcatccaaagcaacgtctcatttctgtaaagaaatggcggaagggcagtgcatagaggaaataaagtctgaaaagatattctaaaatgttcagagttgttttcttgcagctgtgctgtgttttctatgatgaacaccaactatttgtgagatcaaaacaatttttttttttttgagatggagtttcactcttgttgcccaggctggagtgcaatggtgtgatctcagctcactgcaacctctgcctccggttcaagtgattctcctgcctcagcctcctgagtagctgggattacaggtgcccgctaccacacctggctaatttttgtatttttagtagagatggggttttgccatgttggtcaggctggtcctgacctcaggtgaaccagctgccttggcctcccaaagtgctaggattacaggcatgagccaccatgcctagctcaaaaattttttaagagagaaaagctatattgactccatgagtatgtggaacaaccactcaagcagttctcctcacgtctctctccttcagccagcccatgctggatttgaaatgcaagtgattttgtgaactgcagacctcattagtgtctccagacatccatccatccaacaaatggatgttgacaggggccccagtaagtgccaggcagcaaaatgtgctggagatacaatgaccactaaaggctagaccctgcctccaaggagctcacagtctggtggaacatagattttgatgagtacataaccagttatgttacaagaagctcaaaacagaagtgtgagcaatgtgctagagaaatatagaccagaggacaactggttctgtttagagggctctgtaaaggtggtcttgaggcgttgggctttgagctggcctgcaaatgtacagcatgctgtgaaggcttatcagatggggaagacagcacatgcaaaggtgcagagagcttaccagcaggacctggagttggtggtcaggtgtggcaggagttacgagggagcagacaatgaatttcattaactgagcaggtagtgaacatctagcatatgtcaggcttttggctaagggcttgctgatgaaatagcaaaggcatttgagattagagtccaaagggccttgaatgctattctgtctcctttccaataaaacaaaattgagatgaaaatgtgggcttatcacttctttcataggagagacacacgtcttcttcatgcatgggccctctcaggtatcttcagctcctgcatctccacattaaaggaggaagcaggactgggtgtgtgtgtagcagaggtaggtgtccacactccctgcttcctgggttcatattctacccgtgtttcagggatattggggaatgagacacttggggaattctcttagaagttgcagaggcagggctgtgctcagaaagtcctagctgggctttgctgtggaggcccagagccatgatcatggaaatgactttcccagctctgcttctctggagggactctggggaaggggaatcactggtctctgaagtgtctttcatgcactaagccgaatgaccttggcctgaatcgctcagggttatgtaagattaggtagccacttagtcaaaaatagctttcatgctgactccagcccacagaatagcatccaagtcaagggggcacagatgcgtcagagctgggcatgcatggggaaattcccctcctggtcctcgccattggaaaatcgcttgagggtgttagccgggacttggagctgctgccaggtaatctcctgtgtgtctctgtttggcagcatatatgtgactgttttgctgaaggagagaaaccaagggaccataaacacagaaatgcagtgcaaacattagaataaaagtgagaaagagggtgcggtaggcagaaagagcactgaactaggagccttcagatctgctactaccattgactttctggagccagtcacttttttctattcattcaacaaatacttactgagcctactgtgtgccagagactgtcctagcactggagacacaaaagggaaggatagatgctatttcttccctcatggaattttagcttgtaagctgtcttgtccctcagcttaaagataacacacatcttctgagaaatttcttatgccaggcactttacaagacattcgacatacacagtgaacaagccagatacagtctttggccacatgcagcttgcagactagagggagaaaaagacaaataaagacaaaaaaaatccagacaatttgtctttgcaataaaaattccaataaagggcgcttttaggcctaagaggaagatgtctgtattgattgggacggtcactgtcttgttcaaagtttctgcccagtgaaggagcatgtcggggctcctgttttctcctcctggaagagacattgggtaaaagcaacctggatcccgcatgaggaagagaaccccatccactgctattcagagtgggtgttggtctgatatttttggaggaaaatttggcaacattcattaaagctttacaagtattcctctcctttgacctaatacattcatttctgggaggttatccaaaggaaataattggataagtgtacaaagatgtacattgtaaagaaactcaatgaatccttatttacgacaattaaaaatttgaaataaccaagacagtcaataataagggattgttgaagcaaattgtagtctagctggactggtagcacatgtctatagtcccggatatggcaggaagatccctcgagcccaggaattggggttcagcctgggcaacatagtaagaccctgtctcaaataaaaaataaaaaattgcagtatatctataaagtgccataaaataatttttgccctttataccattaacatggaaagatgttcatgatatgataagttaaaaaaattggttcaaaaaattgtgtgggatagtaccaaaaagagcagaatacgtaagaataaatttacccaagaaggtgtaagacttctttacggaaactttaaaacactgccaaaagagatgaaagaagacctaaatatacagacattctttgcttatgggttagaagactcactttttaaattaaattttaatttctatcattaatttatttgtttatttttatgggaaccactaagaccgcgtcgtctccttactcccctgaaggaagagaagaaggatcatcaatggcaagcggcagctgcaacaaaacaacactatgagctggctgcatgctcaggaaagaatgcccgcctcctccgtttggtttccagtgctctaaacattcagagaaacttctctagtattgaatgacagaaatgagccctgagagtagagtcttagaagacttgattttgttaagacaacaatattccccaaagcaatatgcagattcaatgcaatccctatcaaagtccccaaatcccacaaattccgttttgctgaagtagaaaagctgactctgaaatgtacatagaattgcaagggatcccaaatagtcaaaacaatcttgcaaaaagaagaacaaggtgttaagactcacatttgccaatttcaaaacttactacaaagctacagtaatcaaaatcatgtactaccaacataaggatagtcatgcatatagatcaatggaatagaattgacaatccagaaataaacgtatgcaactatggtcaattgattttcaacaagggtgccaagaccattcaatgggggaaaagaagggtttcttcaacaaatggtgccaggccaactgattatccacatgcaaaagaacaaagttagacgttaccacacatcatgtacaaaaattaacacaaaatgaataaaattctaaatataagagctaaagccataaaagtctaagaaaagaacagctttataaccttgggtttggcaacagtttcttagaccaaaaacaaaaggaacaaatgaaaaataagttgggggcttcatcagaataaaaaacttctgtgcatgaaagaacgctatcaagaatgcaaaaggaaacccacagaatggaagaatatatttgcaaatcatatatttgacaagaatcttgtatccagaatatagaaagaacttgtacaactcaacaagaaaaacacaaacaactcaatttttaaaatggacaaaggcatgaaaaagaacaaaatcatgtcctttgcagcaacatggatgcagctgaaggctattatcctaagtaaattaacacagaaacagaagaccaaatgccacatgttctcacttgtacgtggcagctaaacatggggtacacacggacacaaagatgggaacaatagacactgggggctccaaaagcggggaggaggggtgggagggcaagggctgaaaaactacctattgggtactgtgttcactatttggttgatgggatcaatagaagcccaaacttcagcatcacacaatatacctacgtagaaaacctgtacatgtacccccgagtgtaaaaaagatgggcaaaggccttgaatagatatctctccaaggaagatatacaaatggtcaacaagcacgtgaaaagatgtttaacatcattagtcattagggaaatgcaattcaaaaccacaaaaatgtaggtatgagatagcatttcatacccactaggttggttataataaaacaaaacaaaacaaacagaaggaatatgacaagttttggtatggatgtagagaaattggaaccctcatacattgctggtggaaatgtagccactatgggaatcggtttggtgtttcttcaataagttaaagacagaatgaccatttgatgtagcagtcccactcttaagtatatagtcaaaagaactgaaaacaggtattcaaataaaaacttacatgttcatagcagcactattcacaacagacaaaaggtggaaatagcccaaatgtccctcaactaatgaatagataaacaaaatatggcatatccatgcgatggaatgttatttggctataaaaaggaacgaagtagtgatgcatgctacagcatggatgaaccttgaaaacagactggacctggtggctcacacctataatcccaacactttgggaggctgagggtggggggtgaatcacttgaggccaagagttcaagaccaacctgggcaacatagtgagattctgtctttacaatttctttttaattagttgggcttgcacctgtagtcccagctattttggaggctgaggtgggaggatcacttaagccaaagaggttgaggctgcagtgagctatgattatttcactgcactccagcctgagtgacagagacagagagagaccctgtctctaaaaaaaaaaaaaaaaagaaaaagaaaaaaaatttttttaaaaaccttgaaaacattatgcttggctgagtgtgttggctcacatctgcaatcccagcacttttggaggccaaggtgggaggatcgcttgaggtcaggatttggagaccagccttgctgatgtggtgaaaccccatctctactaaaaatatgaaaattatccaggcttggtggtgcatgcctgtagtcccagctacttagaaggctgaggcaggagaaatcatttgaatccgggaggcggaggttgcagtgagtctagatcacgccactgcgctccagcctgggcaacagagcgagactctgtccccattaaaaaaaaaaattatgctaagtgaaagaagtgagacacaaaagatcacatattgtatggttccactgatgtgaaatacccagcataggcagatccatggagctagaaagcagattcgtggttgccaggggctgtcgggagaggggaatggagagtgactcttcagtggatgtgggatttccatctggggtgatgaaattattctgaaattatatagtggtgatgattgttcagcattgagaatgcactaaatgccactgaactgtacacttcgaaatggttgaaatggttaaaatggtgaaaaattgttgtgggtattccagaaaaataattggaaggatgaacaataaaatgttaacagtgattatttctggataacagtaggagtgactttcactctcctatttttctttttatactatatgaatactttatgagaagcatgttttgcattagtaatcagagtgaataaaagccatagtgaactgttttcactttagaaggcaagaagcaagacggaagggaggaagaaaagacggaaggaaggaaggaaaggagggaggaaggaagggagggagggaaggaaggagagggaaggagagagcggaaggaagaaaaaaagggagtccttgaacccaccccccacaactccctcatctctctcattactttggaggtgcaggccttgctagtgtcaggctgggggttgtatgggtttctggttagacaccaagaaggaccttttaggttaataggattgaggtcagcaaccaacagaactctttacatatcctatgggaagatccctaagatatattgtataaagagcaagatttaggacagagtgtgacaattagtgtaattatacactcaaacacatacacacacacgctcctgcacatacagtcgtaattactaaagagtgcatgccggccaggcttggtcgctcacgcctgaaatcttaacactttgggaggccaaggaaagaggattgcttgaggataggagttctaaaccagcctgggctacatagcaagatcctgcctctacaaaaaataaaaatacagaattagcagtgtgtggtggtgcattcctatagtcctagctgcttgcagggaagaggcaggaggatcatttgaactcaggaggtctaggctgcagtaagtcaggatcatgccactgcactccagcctgggtgatagaacaggatcctgtctctccatcccaaaaaatgtgtatgcgtatgcatttgcaaatgtaaagataccctctaccaaaatggctgaaaaacagcaagaatggttttccccagggagggcaactggtgattagacaggagagaaagagaaggaaacagacatttcactgtatatacccatctacccatctctccatctctgtatcttttgtatttggtagtatgtatatacttttttttttttttttttctgatggagtcgcctctgttgcccaggctggagtgcagtggcacaatcttggctcactgcaacctccgcctcccaggttcaagcaaatctcctgcctcagcctccagagtagatgggattacaggcgcatgccaccgcaccaggctaatttttgtatttttagtaaagatggggtttcaccatgttgcccaggctggtctcaaactcctgagctcaagcaatctgcccgcctcagcctcccaaagtgctggtattacaggcgtgagccactgcgcccagctgtatgcatgtactttcaaagacagatatttttttcctctgagcactttctttatgtcacaaaaacaaaatttccaaaacaaaaaatttgtttggtttccgccctatttttgtatttaccaaatttttataacaacagatattatttaacagtgcataaaaggcagatattacttaacacactcaagtaagacagaaatgtttaaagtaaaaacagaacactcctccttccagttttctttcaaaaggaaaatatatttataataaaatgtattttaaaatgaaataaaggtatcagaaaaatggtctttttttaaaaaaaacttctctgttggtttcctttcccctaaattttctacagtgctatctattatttcatgttggaaaatgtctgtaattagctgagtctttaaacataaagccatgggttttaggcagctggtgaagccgcattggcctgaccttgacctccatggagccctggaccctttgcctctggccctgatctctgcagcctccttggcccagaccctgggccctgccagtccagctgtcttcacgtggcctgcacagactgccaagccaccaaccctcaggactccctgtggagaactaggacgggatggggggcagggtgcttctggatatttttcaaggaggggcatgggggctgttttgaagctatgtttgccctataagccaactttgatagcgtatggtagacaaagttttaaaagaattttttcttcatgcttttatgttagattgaacaaacattactttgaagaagggggcagcaggtgctgggggaacctgatggagattgagaagtgggccagcccctggactaccctccctgtccccactggtgtggccgtcactggagggacattgatgttcatctgcccatctccgctctgcagaggacagaggcagacacaggctctcccatctgccttgggcccagacatgccattggaaaacccccctggggccactcacatgatgtgggactaagagtttggagcttttctcctgggactcgttttctgagcctttccccatcctggcttctcttctctgctgtccccgcacgtctgaggtgatgctaagtcagattaaagtgggccagtcagaaacatttccaaggtctgctgggggcagctccagcaaggttcttactgtctccagtagctaccctattacctgaaatatatccatttaagaaccatcttatttttaatttgtgtttttaaaaaccccataagttcattttctcccctgaattatgaaaatatatcactgtgaaaagtagcaaaaagtagaaacaacccctccctctctgctaccaaaaatgtcacaaaacacatacacccagtaccttgagaggatctctagtattttggagtatttctttgaagtctttaaaaataaatatcagagtcatttttgttatcattgcttaatattgtgattagtccatacatcaatgatcttttttttttttaaataaaaaccatatcaacagaagctttttttttttttttttttttttttttgagacagggtttcacttccattgcccaggctgaattgcaagatttcggctcactgcaacctctgcctcccaggctcaggtgatcctcccacctcagcctcctgagtagctgggaccacaggtgcatgccaccacacccagcgaatttttgtacttttttgtagagacaggattttgccatgttgctcaggctggtcttgaactcctgagctcaagtgctctgcccacttcagcctcccaaagtgctgggattacaggcatgagccaccatgcccaactagaagctttttttttttatgttgctattaagtgctggctctgatgtgctactagctctgtaatttggggtgtgttaacctctctgtgccccagttttcttatctgcaaaatgaggacaataccagtatctatcctaccgagctcctgtaaggatttaatgaaatagtgcaggtaaaatgctttgccaacagccacattcaacaaatattagcaattcatctattgctagcatggacgaagttgaattttgcttttcagctagggtgaataatccaatgttgaacacctctgtgtctagagcctcatccatagagaggattaatttctttcaagagattcctggacatggagttgctgaaccaaagggtataggccttttttctttctttctttttctttctttttttttaagacaatcttcctctgtcacccaggctggagtgcaatggtgcgatctcggctcattacaacctctgcctcccgggttcaagtgattctcctgcctcagcctcctgagtagctgggactacaggcgcctgccaccacacccagctgattttgcatttttagtagagacggggtttcaccatgttggtgaggctggtctcgaactcctgacctcaagcgatctgcctacctcagcccctcgaagtgctgggattataggcatgagccagcatgcctggccttttttatttttatggttttttttgtagagagatggtctcactaagctctccggggtggtctctagcggtcccctcaccttgccctcccaaagtgctgggattatgcgtgagagccacggctactggtcccaggcctttctaaagttcttgatatagattgccatcaacactcctgcaggagaagaagactcctggcgttaagtgtaactctgtcttctgagtacagggcattgagtctctctccctgactccagcacacacaacgttagtggatgtgaattcagacggcttctctctcggaacacgcctgcctaagagtttgataagacatcttggcatcacagccgcctgttggaataaccctgagacctcagtttcactctctgtgaaacctggtcaaagatcttgctcaaggtgtggcaaagagtaatcaataactaatggctggggctgacttttgttctcctggtcataaaagacctttgaattgcttggccactttgggtttctcaggaaaagtgataacactaagccaaagttcatcccagttggccaggctgcctctctccagcacccacaaggctggagggagagagggaatgaccaccgtcccatgagtgttgggctgggttcactggggttagggtcaccaagggtaggagccatttccccattgacccacctatgcatcacaccacagaaatatcccggtgctctgtttatctcccacccctcccccgacacagcggaaggacgtaagttttcacgcatagtggacagaggacttagaccgaatgaggtgaggcttggtcagccctgatatgagaaacacagatcaaaaccagacttatccctctgctatcatcacccagccacccaacaccacttcccagaatgactcaatcgacatttcctgtacccgagcctgggatctccattttattaagctttccggaagatgttatcatctagcaagtttttgaaggaagcataggactatgcctatcccagtggtgtctgcccaggtctcctctgtgctcaaacaccatgcaaggcttcctcactccagccggaagcctcagcgcttagtgtggtattctaggcttcagttcacctgtacagaccatctcccagctctccctcactcactacccactgcagctactctggggttcctggtgcttgaatatgctgtgggcctttaggaagagcaaccttgctcttgttatgctgttaacttaatgaaatcctctccaacatttaaggcccagctctgatgctccaactctagaagcctcccttgatccagccctatctagaagtgaccccctcaactttcctctgagctccaatagactctcctcgtctgggcccgcacgtaactctggtcactttccaccttattttacagatgttggttggcctcatctccccaagctgtctagaagctgcttaagggcaggccccacaactggttggttcatctctatgtccgcagtgcaaaacgtcgcatctcttaaggcaattagtaagtgtgctgtaatgaattaattcatgtccaccatgacaaagagatactggtccgaaacgtgaattaagtagagatagctttatctcttcctttccattctgggtgccttttattttattttcttgcctaattgccccggcaggaaactcaagtacaatgttgaatagaaaaggggggaataggtatcatcttgttcctggtcttgggggaagcacttggtctttcaccattgagtatgatttagttgtgggctttttatagatgccctctactaggttaaggatattcccttctattcctattttgttgagttttattattattattatgaagaagtgttgaattttgtcaaatgctttttccgcgtctattgaaatgatcatgtggtttttgtcctttattgtattgacaaagtgtattacattaattgacatttcagatgttaatcttgcatttctgggacatttaccagttggtcatggtgtctaattcttctgataaattgctgtgttctgcttactagtattttgttgagatttttctgtctacattcataaatgaaattgatctgtgctttttgtgtgatgttttggtctgatttttgtatcatagtaatactggcttcacaggataaggtgggaagtgtttcctcctcttctattttttggaagtttgtgaggaattcttcaaaaatttggtagaatgtactagtgaattctggtcctggtcttttctctgtgggtagttttttgattactaattccgtctttttacttgtttcaagtcattcagatgttctatttcttcctgaaacagttttactactttatggctttccaggaatttgtccatttcatgtaaattatctaacttgttggcatacagttgtttatagtaatcctttataatccattttatttatataaggtctgtaataatcccccctttttcattcctgattttaacaatttgaatcttctctctttttttcttgatccatctagattaaggtttgtcaattttgttaatcttgttgaataaccaacttttaatttccttgattttcttgatatttttctatcatctatttcattaattttggctctaaactttattatttcatttcttctgcttgttctaggtttagtttactctgctttttttccagtcttaagattattgattagagatctttcttcttttttgtaatgtaggtgtaaatttccctctaagcactgatttggctgtatcccaagtgttttgatatattttgtcttcatttttattcattgaaaagattttcctaatttgccttggaattttttttaattcaatgattctttaggagtgtgttgtttaatttccacatatttgtgaatttcccaaatttatttctgtcattgatttctaatttcactccattgttattagagaacatactatatatgatttcaatcctttcaaatttattcaaatttgttttatgacctagtatatggtctatcctagagaaagtttcatgtacattagatgagaatgtatactatacttttgttgattggagtggtctgtagatgtttttgaggtctagcaggtttatagtggtgttcaaaacttctgtttccttgttaatcttctgtgcctcataattttgtctcttcaatgcattagaaaataaatgctcctttcttgtttatttatttatttttatagagattagggggtatcactatgttgcccaggctggtctcaaattcctgggctcaaagtgatccacctgtctgggcctccccaaatgctgggattacaagcgtgagccactgtgcccagccaatacatctttacagattaatttgcttgttccttagaggtttagttttggagtcctaactatcgagtttgactatctagacaaatgtaattcttcttataagaacaaactctgtactcctctgagctctggatgaatctaacatatgaaatattggttaaggcttggaatgtaaaatcttggtgaagaagggctttcttacctgatcctcttagggacatgtgattcttgaagtgtggttctagataaaccagccctgaatctgctattcaaccaagctgatgttttcttccttctctccttttctccttgtttcctccttctttcttctctcttcttccctccttcccatacttttactatcctttttccatccaatcatttatttatacttttcttcctttgtatccattcatttgtcctttccttcttccttccttctttcctttcttcccttcttccttgcttcttttcttccttcctttttttaattcagttattcatcctattctccatcctttcatccatctgtccttctttacttccgtctatctgttcaccttcccttacctcctctcttctctcactgccttctttcatttctttccactctccctcccttcctcccatctatccactcatccatccatttttagcaataaagcaccagacaggactcaaactacctgaaatagctgagctcgaagtaggtgtggtggtggtgctggggtgaaggcccctgatttctaattctcattttccttccaagaatctacaaagtgcctaatggtgctgcttcactcacagacttttataaaatacctgttgtgagccaggcatagttcctcgcactgggaatgagtaaggtctagttgctactcccagggacagagaataacagtacagcctggaaaaactgcagtatggcggcctcaaaggctgaggaataggaaccttcaggggggcatttggagaggttttcttggagaaataggtttttggtcgagccttgaattatgagcatttatgtgagaatcaaatgtaatagcacatgagattataaaatgtaaaaatgtcacagagagggagtgacatttattgttgagacttatggtaaaaaccgcttaaagtaataacaactggcctgcatagaaaaggtatttgttagaagcattaacaaattcctatgcagtttttaagactgtaagacaaatgtgctgctggtggaatcagacactcacagagtagtgaggcagggtagaggagtacttcagagcatgggctttggtatcagacccacctggctccaagcccttctgtcacttgctgtccatgtgctcatctgtggaatggggatgacagtataagaggattaaatgggatggtacaggtgggggttggtggcacacagtgaatgctctgtcaacgccagctgctactgttcatgagaaaggggctcaaaggtcatctgactccaggtggtatggattcatgttttcctcctgaaaaggtgctttttatctgctaccaaataaccaaatatgtaatcttggggaaattacttgttttttcttagcccttccttgccttttttttttcagtaaaatctctcaagatcataatgagaaaagcaagatctggctgggcacggtggctcatgcctgtaatcccagcactttgggaggccgaggtgggtggatcaccagaggtcaggaggtctagactagcctggccaacatggtgaaaccccatctctactaaaaatacaaaaattagctggacctggtgtcccacacctgtagtcccagctacttgggagtctgaggcaggagaatcgcttgaacccgggaggcagaggttgcagtgagttgagattgcaccactgcactccagcctgggcaacagagcgagactcagtctcaaaaacaataaaaagaaagatctgttaagggaaaagatatttgaaaattgaaaattgcaagccaaagatgttcacctcagtattgtttatcatggagatgtagggaaatggaaaaagcatagatagacatcccaaaataggggactattaaataaattatgaaacttccttcagtggaatcacaagcaatgaagaattaggtccatgaaagccaaggttttctccttttgttgaatggggaacccctcagcacccaaaacaatgctcgtcatatggtaggtgctcagtatttatcaaagaaacgaatgaacaaagaaaaattaactgccaagaggcatccacctggctgttgttttggtgcatggggtagaaaagtggactagaagagctagggttgagagactaaggagagagcaagaaagttaaactatcaagagctgtcaagtgggatgtttgagggtgtttgttggatgctgggctgtatgactgtctcctccatgtcccacaaagtcttcagtaaaatatacagtgtctggcagtgtttttggaattgcatgtgtgtttttaggaggtgaaatgaaatatagaagactggcttcaattggagaataccatgggcatccagtcacatctgagtatgataatgtagaagagtttaatgacgtggaaagatgctcacaatatattgttaaggaaaataattgggtacagaaggggatgggtaattgcatcccattttggttaaaatagaaaaacatctgctcatgtctggatggtgagttgaagaaatattttttcctttttgtgaattcatgctttaaacttttctttaatcaatatgtactgcttgtgaacttgaaaataacgtgaactgttggatgagcttgagctgtccttattgcatttgactggttggtaaagaaattgagctagggtcaagtgtcattgtcaagatcaagccaagactgagtggcccatcaatttatggccagttcagtgacgtttctactggattagaaggaaacaagtagtgttttcagtgccttggacccccagcatctgaaagatctgaaagactgggccattccttcttccactacctcccttttgctagagtccagagaacgatcattgtccaggagactatcaatggttataagtatattccctcttctccatttcaaaggacactcactaggttttcttttgtacttcaggtcagtaacatgacccttgggatcctctgggaagagaatcatgttagcaggatgggctgtgaagcctcctgcagattaagccagttataatctgtgactcatatctgtagatagcaattttcttacaggtgtttgttgagtgatagggacatacagagagacaagagatagaggggcagcccaggtaacataccaaaaagcataactgtataacctggaactgaaagagacctttgacatcacctaacttgtggctgggtgatctgggaaacaggcttgggttgtacagccagggccagaatgaggtggttttgcttcctaaacatctctccatttcatcctttcctgctccttctccctactctggcctgcagggacgccacagcacttccctagctgatcttctttcaatccagagctatgtcactaaaggttctttgagcttatgttgaggaatctggacttaaatctggggcaaggagacaccatggaagaatttttaggcaggagcacaatggggtcatatctggatttcaggtggccacagaaaccctttgtttgttgtgtacagaatggacccaaggcagttagagtagactcagggagagcagtgaggaggctgctgtaattgtccaggtgagaggaggtgacagcctggaccagggctgtggcagtggaggtaagtgggtggtctccctgactcctcaagcctctcattgacctccacctttggtgcttatagtcagtatcccccagtttaatacctagttctgggcttctattggttaggatatttcagatgtgattgcatagaaacccacctcaaaccagcttaactcagcatcattgagccatgtcaggcacatgataggtgtttagtaaacaatgaaccagtaaatgaatgaatgacttaatgaatgactcttgactcctggaccattgttctttctactgtgcataatactgactttaagcctaaattccataaccctaaattccataacctctaaagaccatctattctgggcttgcgcccaactcaggaatgccccctacaacatgcttgacagatacccgtttggcttgtctttggaattttccaaggacagaatattcactacctcaaaaagccattcagatgaaagagtaaatagatatatatattttttgaaatatataaataaagcttttgaaataaagcttttgaaagctttattgaagtataatttacatatacccatttaaatataaagttcaatgagtttgacaaacatatacagtcctgtaactaccactgcaaagccattttagaatatttccatcatagagctgagcatgatagtttgcacctgtaatctcagctactcaggaggctgaggattgcttggacccaggaggctgaagattgcttggacccaggagttggaggctgtagtgagctatgattgtgtcactgcactccagcctggacaacagagcaagaccctgtctaacatttccattgtgccacaaagtttgtttatattcccttgcagttcgtctgttctgtccactcctggtctctactttctgtccttttaattttgtgttttctaaaacttcatttgaatggaatcattactatgtggtcttgaatcgggaatagtttacttagtataatgtatttgagattcatctacgctgttgtgtcggtagtttgttcccttttattgctgagtagtattccaataaatgggcatatcacaatttgctgattcattcaccagttgaaggacatttgtgttgtttccagttttggctattgttaactgagctactgtgaaaattcacatatacatccttgagtggacatatttttttcgtttatcttatataaatacctagggtgggatttccgggtactataaaagatatatgtttaattttattaggaaaaaactgccgaactattttccaaagtggttataccattttgcattcctggcaatatggtatgagagttccagttgttccacaacatcataagcacttggtattgtcagttttaacattttagtcaccatagggaatgcgtagtgctttcatattgtgattttctcatatattcccttaatgactaatgatatagagcattttccatgtgcttatttgctattccaacaaaataggtgtaactttaaggcaattctttctgctcttagaaatctccaaactctctctattgattcaattcagtttaacaaatatttacagatgacttactctatgtcatttactgcgaggtctgatgagcccaagacgattaagatccatccctgatcttgatttgtttagagtctcatggggggaaacatacttaaaagagaaacatttctctttaaaactgttagtggattcatagaggtaagcccaggacacagggaaaaactgaggaagagtactctacccagtcaacggtgctggcaggcggtagggtgtgaggaatgttcacaggaacgtccaccctggctctgaactgtggcatcacagaggtacggacttgttatcattcattcgtcacatactcaatgagcacctaacgtggaccagatgctgtgctggcctggggaggatgggtataaaccagacagacattgtccctgtctcaaggatcttacaaagtgagaacaaaagttcatttcctttccttgtggaaacatattttaaaaaaactacctaactacttattatatatataaaaaaaaccctacctatcaaagaattgctaagtgattagaaaacataaaaacagatttatgctaattgtatgttatataattttacagggatgattcattataatgtcttttatttaagacataggtatttattcagtgctcagctccttcacatggattatctcactgggtctacatgatcaatgagagagattagattgctaccgtctgaaactgagagtcagagagctaaaaaaactggcccaaaggcactcaaaagtagaaccagtctttgaagcaaaatcttgggactttaagttcaaatgctactttgaataatatctgtaccattggcatatttttagtacaatttgaggactgaagtactaactctaaaattactaattaaaattaaggtccaagggattatggtttgtgttattttccaaatatctatccaaatcccccattgagcctatgaggatatgggggtccagtgggaatagccacatagagagtcacaatccaagtccaggcctcctgactccatgctgttgctttgtgagagtgctacctctcagtgctaacttgtatgatcactcctgtttatttagtccataggcatttggagcagatgtgctgctggaggcaaaaaagtgaggaatggtgggaagagagactagagagacctgggttcaaatctcagctctgctagtctcaagctgaatgatttggcaagtagcttaactttttcttttcttttcttttcttttctttctttttttcgttctttccttttctttttctttcttttctttctctctttctttctttcctccttctttctttctttttttttcacggggtctcactatgttgcccaggctggagtgcagcggtgcaatctcagctcactgcaacctccaccttccaggctcaagcaatcctcccacctcagccctcaaatagctggtaccacaggcacatgccaccacacccggctaatttttgtatttgtttttgtagagatggggttttgctatgttgcccaggatggtggtctcgaactcctgggttcaagtgatctgtccgcttcagcctcccaaagtgttaggattacaggcatgagccaccacatccagcctcagcttaatttttctgagtctcagcttcctggtctgtgaaatggggctaataacagcactgacaccttaaagctgctggaaggcatcaaagaagaaatgtgtaggaagccctccccttgagctctggattttgaataggtaaaggaatgcaaacacttagctccctgctgggcctataatagcactcgataaattacacaatgaccagcttttctatttaataattgcactaaaattattttttatgaagatcaaattaaaggaaatttgaatagagaacatttttactcaaacctaaattcaaagacactgtttttatctctccatgttttttcaaaactttatccccatttgggaattgcactaaaatgatttattattaaaaatctgacaccaacattaaggaaagcccaagagtacatttttattttaagtccaccactcaaatgtgctaacagttttaattttccacatttcattccaacatttatccagagattttttttatattgttggaatcagaatgattctctttgtgtcattctttttaaaaaaatttttttcattatttaattttatttcagattatgtaatgaattacgttcatatgtaaaccttatgcttatgatttcttatggttccatagaattctactcagtagaatctagccagtaacatggaactcaactcttgcaggaaatattatattatcatgtcaccttatatattccacaaaatcactaaatgtttactatttagcctttgagcatcatgacaatcctgtaagtactaaacaattccattttacagataaggaaactgaggctcaggttattttaataagttgccaaaattcatacagctaatgtctagtgttcatgttatctactactacaacgaattacctcaagatgtagtggcttaaagcaacaacatccatttatttgttcttaattctgcaatttgggcagggcttggtggggctggttcatctctgttccacatggtactgacgagagtggcttcagtggaactggaagatccaagatgagttcattcaggtgcctggtgtctcagctgaggaggccgaaatggcagggggctggttgggtttctctccctttgtggtctctaatcttctaggggctctttctttctttctctccacgtggtctgtccagcagattagctgggcttctttccatgatggctggcttcctagagggcaaaaacagaagctcccaggtgtcttaagaactagccccagaaatggcaccgtgtcatttctgttacattctcttggtcaaaacaagtcacaaggccagcccaaagtcaaggagagggaaacagaccctacccttgatgcttggaggcatagtgtgcatgaggatgggctggactgttggccatcatctttacagtgatagagcagggcttcaaacacaggcctgtcttcctccaggctccaaactcagctcccgcccccataccccctcaatgaatgtttttgtctggctagctttttctcttcctttcactcatttttagggtaaattcccaaggacagggagacttggtcaaagggcagacaatgttgagctctatgctgagataaatcaacttttgcataacaaagtaatctcatgagctttaagtatgtgactaaaaacttttttttccccacctcctttttcttcacaaaggagaccaggtttatttttgttcattctattgtttcacctattttgacagaggaaatcttggttcctgctgtggagaacatcctcaggacttccaggcaacaacaaagtcagcaaagagctgtgacattcacctgctcctgagctatgcaggatggtgttccctgtggatcggggcatgcgggaaaactcactggctgaccttgacttttcacagaacttgggatgtcatgaaacgaacatgacttagacttgcccgagtttagacctccttctgaagtgtaaccctgtgcgtctttgtttactgtctcagtttatgcctgttgtcacgtgtcctgtccagtttagtatttgtccagggcaaaagttttccaatttgggcaataaattatatgatcacccttcctgccgcaggagcttgggcaagacatttctcctccctgagcctcagtttcctcatctgtacagtgggcctggctacctatttcacagaaatatggatcccttttcacttaatagcatccttccatgtggcagaaactgtcttggactctggaggatccagggggtaacaaaacgtggttcctgctctgctagtaaacaagcaagataatttcagaaatttgatttatatcaggaagtcaggaagggcctctctgaggaggtggaatttgagataagggatgaggaatgagagcaggccacaaagggagctgagggaagaacatgccaggttaagggaacagcagtgcaaaggccatggggcaagagataactggccagagggaacggaatggagctcaggagcaggtcgtgttctataaactgcgaagagccccagcagttattttcctcctagagggttttaaaatactctcccatcctttaactgaaatgattctcaaaataactccaaaaaggcagggcagggcagaggttttttttttcttttaattttaatttttttttttttttagacagagtcttgctctgtcgcccaggctggagtgcagtggcacgatctctgctcactgcaacctccacctcccagcttcaagcaattcttgtgcctcagcctcctgagtagctggcaccacaggtgtgcaccaccacacccggctaatttttttttttttagatggagcctcactctgtcaccaagctggagtgcagtggtgcgatctcggctcactgcaacctccgcctactgagttcaagcaattctcctgccttagcctccctagtagctgggattacaggcgcccgccaccacactcagctaattttttgtatttttagtggagatggggtttcactatattggccgggctggtctcaaactcctgacctcaggcgatccacccgtctcagccttccaaagtgctaggattacaggcgtgagccaccacacccggccacgcctggctaatttttgtattcttagtagagatggggtttcaccatgttggacagactggtcttgaactcctgacctcaggtgatccacctgcctcgacctcccagagtgttgggattacaggtgtgagccactgcacccagcctaattttaattttaaaattctaattagagacgaggtcttgctatgttgcccaggctagtcttgaactcctaggctcaagctatcctctttcctcagcctcctgaagtgctggaattacatgcatgagccacagtgcctgacccaaagatgtattattattattattgttattattattttttgagaatgagtctcactctgtcacccaggctggagtgcagtggcaagatctcgcgctgcaacctccatctcccaggttcaagcgattctcctgcctcagcctcctgagtagctgggattacaggcacatgccaccacgcgcagctaatttttgtatttttagtagagacaaggtttcaccatattggtcaggctggtctcgaactcctgacctcgtgatccacccgcctcggcctcccaaagtgctgggattataggcatgagccaccgtgcctggccaaagatgtattattaatcctgctttacagaacaaaaaatccttatgagttatctttgcaaatttttccaaaatggacccactatatttctatgcttaaatttaatctgacgtatctccatgatcttttattgtttttgatgataggaatctttcagaaaccagagacatctttaggcacatcttcccattgtgatatttaattcggtagttaagtcctcatgtgcactgcttttgcatctatattcataagagatattgatctgtagttttcttgtgatgactttggttttagtatcgaagtagtgctggcctcacagactgaggtgggaagtgttccctcctcttctatttttttggaagatgttgtgagaatcgtattagtcctttttcaaatgtttgatagaattcaccagtggagatatctgggtctggtcttttctttgtggataattttttatttctaattcgatctctttacttctatttcttcttgaatcagttttaatagtttgcacctttctaggagtttgttcattttatctgcgttttctaatttattgccattcagttgttcatagtttctctcacaatcctttctatttctgtaagtgactcctcttttattttttaattttatttattttttggagacggagtcttgctctgtcacccaggctggagtgcagtggcgcgatctttgctcattgcaaactccgcctcccgagttcacgccattctcctgcctcaacctcctgagtagctgggactacaggcgcctgccaccacacccggctaatttttgcatttttagtaggacctcaggtgattggcctgcatcggcctcccaaagtgttgggattacaggtatgagccaccatgcccggcattatttcttattttagtaatatgagtcatctctctttttttcttggtcaatctaactgaagttctcttaatttattttgctgatcttttcaaaggaccaattattggttttgttgatttttctctattgtttttctagtctctattttgttggtttctgttaaaatttgtattatttcttcttttctgcttgctttttccagtgtctgggtagagggttagattattgattctagatctttcttcatatttcttcatttttaatataggcatttaacattctaaatttccctctgtcatgtataccaatgtttaacttttggactatagggtctcattgtaccctccccactcaccctgaagaggctggagtaaaataatcaggcctagagtcagggagccttggcctggtcctgacactgctgctcactaagtgacctctgatgagtccctgcccctcttgagtcttagttgttgtctgtctgtaaaatgaagaggctgaccatggcatctccaggagtctcctagtcaaactagcctgggggacaggctcatgtcagactcatctctgtgtcccttttgattggacatctgttgtttctgccgctcagcactctcctttccctttggtaaggcacctgctttccctttggggagacactcattcctcaccttctattcaaagtttttttttgtgccatggacccctctggcagcccatagaagcccatggacccctcctcagattgatttcttatttttattttattttattttaattttttttgagacggtctcgctctgttgtccaggctggagtgcagtggcgcgatcttggctcactgcagtctccatctcccgggttcaagtgattctcctgactcagcctcccaagtagctgggactacaggcatgtgccaccatgcccagctaagttttgtattttcagtagagacagggtttcaccatgttgcccaggctggtctcaaattcctgacctcaggtgatctgcctgcctcagcctcccaaagtgctgggatcacaggcataagccaccatgcccggcctcagattgattttttaaatggtatgacatatactacatatggtctaaaggaagccaattgtattgaaacagttatgaaattattaggaaaacaaacttttgatatagaaatatttgtacttcttgattagcacaataaaaaccaagccctacttggcctaataaccagtataatttcaaactagtgttgaacataagtgatattttaagatacctgtgacaattgtgatgtgatatgaaatatctgtgatctctattggtgacaaagttataggtaattttttttagacaaattattgttctattgcccaggctagagtgcaggcgtgattgtggctcactgaagcctcgacctcctgggctcaagccatcctcccaccacagcctcctgagtagctgggactactgtgcctggctaatttattttttctgtagagacgaagtcttactatgttgcccaggccggtaattttaatactaccatgacttgttggctatatttataacagaaaagaaaatgctaaatttcagttgcagattagtgaaaagagagatgtattttttttttctcacccaaattaatggttccttactaagaagccctggtttggggggtttatatcaaactgcttgactcctggattcagaggtagccatgtaactcaatactggtcaatcagcgcagggattggataagagttttgaatcaaatggatgaaatcagaattgggctaggcacggtggctcatgcttgtaatcccagcaatttggaaggctgaggcgggcgaatcatgaggtcaagagatcgagaccatcctggccaacatggtaaaaccctgtgtctactaaaaatacataaattagctgggtgtggtggtgcgcgcctgtagtcccagctactttggaggctgaggtaggagaatcgcttgaacccaggaggcagaggttgcagtgagccgagatcgtgccacggcactccagcctggtgacagagcaagactccatctcaaaaaaaaaaaaaaggaagaaaaagaattaatccagggcttttgctggacaactgggagagtttcttctgcgggtcttgctaagaggtttgggtttagcctggaacatgtcacctcgctgtcaccaggaaagaacctgactcagaatcaagccaacagagaggaaagcagagctgagaaatgaacatccacatcttcctgataacatccctcccttcagtgtgttaattatgtaagcccatatattatctgttaaagccggtttgggtagggttttctgctcattgcaaacaaaggagtcacaactagtacagtcccaggaagcttggcagagtgcctgccacaaagtaggttgcccatgaaggaatgatgaatgaatttcaaacaatgtagcaacatgattaatgttattcactgaactcatgtaggtagatctggctcaattgtgtattaaaagatgaagactcaaagtaagcattccataggcttttattgtttaaatgaatgaaagaactcatccattgtcatcattttattaacaaactatccccagctttgcatattctttagtgatccaatcaggaccacacaaccaaatggggaatgcaagtctagaatcacgatggactaatagttacaaatcaagtttgtgtcacactcacatggggaaaaccatgcagcaatgtaaaggaagaaggtagatctatatgtactgatatgggaagacctccaagacactctaagaaggaaattacaaaatagtaatcacattaagatgccattctcggccgggcgcggtggctcatgcctgtaatctcagcactttgggaggccaaggggggtggattgtctgaggtcaggagttcgagaccaacctggccaacatagtgaaaccccgtctctactgaaaatataaaaagttagctgggcatggtggtgggcgcctgtaatcccagctactagggaggctgaggcaggagaatcgcttgaacccaggaggcggaggttgcagtgagcccagattgtgccactgcactccagcctgggcaacaagagtgaaactccgtctcaaaaaaaaaaaaaaaagctgttctcataaaaacaaaatctcccaaacaaaaacttgagttcctctatgaacataaatgagtgtaaatccaagaaaaagtctagaagtccactcatgaaacactcatagtgggtacctctagcaagggaatggtcacagagccttgtcctttctctgttgtttccaatttttatacgaggataaaatagttgtgttacttgtgtactttaaaataatttctaattttaaaatgaaataataaaacaactctgacagaagggagaatattccttttatgtttctctccccctcaggtgtctgtccgaattcttggggaagctgaggaaaccagggctgtgactgtaatattctgctgtacctatgatctgtgcccatgatgctctgctgtatccatgatgctgtgcccatgatgccatgtcatgctctctgtaccttgccatgcctgtgacactatgccctctccctgggattctgcagtcttcctggctgctctagaagccagggagattccaccccatgtaaaatgctcctggggtggcctgctgacctggattctcctctcaacatcttgagcccaaccacctctgctgtcaaactacacatggcccaggtgacttctctcacaaatgggagagggaatcagagcatttcatagtcagagcagaggccctggggagatgcccatctgcagcagacttgggacaactgatccaattcaagtccatcattgtgcagagtgggattgtgagcctcagagtggagagaagattcatccaactgtgggttcggtgccagccagagtgggactccaccctgactcccagttcagagctcattttggtggggggtcctgaagttctaccatcatagttaccccttgcttgggtctccaaaatgtccctgttccaatgtatatctgttacttaaataacacatttgcaacatagctatcagaggggttggtttttatttagaaagaagctaataagttatattttatttattataaagacaaaattgtaacagcacaaatgaaaatattattaataaaagaaattctttctgccaccctaatcatgtttcatttgttcacattacttaatgtcattctaacatacacactttatgtgtacatttatgcgtacagctgtaacctttttatatacattttatcatcttttttcactcaatgtttattttttctatttttaaggagctgaattcagaagacaatgttatacatttatatagctttctaccttctgcacagtatttcatcaagtaagtaaaccatgacaccttcatagtttttgtatcatgaaatattttaatcatacagaaaatcgcaaggaacaatataccacacatatttaacaaatattgatatttaaaaaatatttctaagcttggcatagtggtgtgtgcctatagttccagctactcacttgggaggctgaggcaggaggatcgcttgagcccaggaattttaggctgtggtgtgctatgctgattaggtatctgcactaagtttgggataaatatgatgacctcctgggagcaggggaccactaggttgcctaatgtgcggtgaaccagcccagtctggaaatggagcaagtcaaaattcccgtgctgattagttgagggatggcatctgtgaatagctatggctttccatcctgggcaacatagcgagaccctgtctcttaaaaaaaataaagatacatttacaggtacagttggagctttcctctgcatgatgtactcaagtccctcccaggatggactatataattttcagggcccagtgcaaaatggaaatgcagggacccttattcaaaaatcatgatgagtttcaagacagcaacagcagagcattaaaccaagcacagagcccttctaagtacaggtcttagtgctactgcacaggtgacagctgtgctacatccaggcagccagctctaattccgcatctcctctcactttcttaacattgatctgtgtctttgttgtcccatgtttatgcttttacttcatatacatgcatagaccaatattatggagtattgtgttacatgttttaaaatattgcataaatggcatcatattgtctgtatccttaggttgcttgtcttactctttttgagaggtatctgtgtggaatcatggagatgttattcattttcactgtcgcctaataatccattgtgagatctcaccacagttcatttatccagtaccctacatttttatcataattaacagtactaaggtgaacatccttgggcacagttctctgtgcatgtatgtgagtttctgtctatctgtcactaggtgtggaattgaactgctctgccttgctggatgttgaagttatttccaagtttttgcttggcatcaatgtgctcccctggggtgcctccctttggatgttcctaagtcatctgaaaagcttcccttgggagactttcctctgagctacctttcttttaagatcaccatccacacagtcagaaactgtgtgtcctgaccctttccttttattccctcaccacttctaacctattgccaaagcctatggattcccactctaaaatatggctttaacccatccttcctccatttccttcctgctacttctgttatcttggctcgggaacccccctcccctagactccttttccaactcctaacttgtccctcaacccccccagtctccagccccccaactttctccactgaaggacttattacaccctaccaagttgcatggtgacatggtgacatgcagtgctcccatgaacattgtagagatcagagctgtgagttacatgacagcaaagattgcatcatagtcaccatttgtggacctgtagcatggtacctggtacccaacagaatctaaaaatatctgttgaatcaaagtccgaataaacatcatgctgtcattttcctatcttttggatgactcaggataaattcgccaaaggagcattattgatgacttaggataatgaacataaagttcatagtcctgtgtaaactgaatttgatccacacaaaactttaggtcagttgagaccagcatgggcaacagagtgagaccctgtctctacaaaaatataaataagttagctggacatggtggcgtgcctatcgttcttactacttgggaggctaagcagggaggatcacttaagcccaggagcttggagctgcagtgaactatgatcacactaccgcactccagtctgtgacagaacgagaccttgtctctaaataaaaatatataatttaaaaaactctaggtcaggtgtgagagataggatgacccttagcaagaagtggttttcccaagatcccaaagccagtaagagacaaagtataaagagcaacaggtactcaggtattctttccacctgcttgtcctatttcataggtgtcctaaatttagtttagaaataactaaatataaactatgttgccttttaatgtcgggtgactgtctctttaaatcttgctgttttaacacaaatatacttcattctaatgtgtatatatatataatatgtatatatatttaaataataacctgatagaatttgtatctctctagaaaagaaagaactctcatctcggggcctttgtttatccatctattaaatgggcataaggagggtccttctaggatcttttgctctgtgagtagataaggaaaaagcacacttttctatccctatctaattttgttgctcccatgctctgtgcagtcatttatggggctgaggaggatgaaggaggaggatttatggggctcttgcaaaactgggaaacagtaatagctgacattatagctgccagtgccccttacctgctgatttgaaagccctttaatcacttgtagcttatgaaacagaaagtgatctgctagctatttcccccaaatgcgttggtgagttcataggttaaccctacaggaaggagacagcattgctaaacacaagaagagccttacttacttcatgggctttcaagtgtcaagggccccaatccttgactctgagaccctcaaatgataccatctagctgatgttgttctaaagggtcagccctgaggagaagttcatcctatggaagtcacctgagcactccacataccatctgaagccctggcttccagttctggctctgccactaaagggctgtgtgacctcagccacattcctccacatttacagtgaagctggtggaaaacacgtttccactgcccctccacagttctaaagttctatcattcaatgggaggtggagatggttctcagcatcaacaatacaaagcagggagatttttagttcctcttggcctgagtccctgcctcctggacagaagctgggaaatagatgagcatctggctccctggcctgggtcacagaatcacagaatcgtgggtggctggcaggaagcctctgcgtttgccaagacccacgtcctacctccctccctcattcaacacaaatttactaagcagttgcgttgagtagaatgtgggcagagatggcggctgttgtgttcaccaatttatccatggcatctagcgcagtggctggcacatagtagctgctcactacatatctgctgaatgatgtctcatctcctacagtaggggagcctattaagcacagattcctgggcccaccccagacctactgaattggaatctctggcgttagtgtccaagtgactgtcatgccctccagagtctgagaaccacagctgtatgtagtgtctgaataaagcatcatcttattattggaaaggagaaaatgctgatgtttcaacttttgagcatttgtcggtagtgactaaaatattcaagtcaaataggttcattttgctgtagccatttccatggagcctggggagctctgggctttgcactaggtatgcacagggctcactttcactaatcttgagggaggcgaggctgataaaaaaggcagagaagataggagtcaagccacacaatgtccaagcttggcattattattgcccttcacttggaagttatcaaacaggacacgcgctgcccttctagctttcctggggaggttagatgctatgagacttttcacactccctttccagtgtctgtggctcagaccatgtacacacccaggttcaaatctgagctgttgtctctatgtagtctggggccaatcactttaaccccctttaaacttttgtttctttagtcataaaatggacatcatgatttaccctacggagggttgctggaaggattagagatgctataaactcaggcgttgggcacatgctcagtacagaaaagccctaaggtttggttgatgtctataaactgccataacatccgggctgcaggactctgtagaggttcatctaggctagctccttcttctttttttttttttttgagacggagtcttgctctgtcgcccaggctggagtgcgatggcacaatctcagctcactgcagcctccgcctcctgggttcaagcaattctcctgactcagcctccctagtagctgggactacaggcgggggccaccacgccctgctaattttttgtatttttagtgagatgaggtttcaccctgttagccaggatggtctagatctcctgacctcataatcagcctgcctcagcctcccaaagtgctgggattataggcgtgagccactgcgcccggactgctccttctttttttttttgagaggaagtctcgctcttgtccccaggctggagtgcgcccaactgaccactccttcgtttttttgttttttgtttttgagacgaagtcttgctcttacccccaggctcactgcaacctccgcctcccaggttcaagcgattctcctgcctcagcctcccgaggagctgagattacaggcacccgccaccacacccggctaatttttgtatttttagtagagatggggtttcaccatgttggccaggctggtctcgaactcctgacctcaggtgatctgcctgcctcgacctcccaaactgctgggattacaggcgtgagccaccaggccaggccgctccttcattttatagataagaaaacagcctcagagaggagaagcaaatggcacaagatcatctagcacctcaggttttttgagggctttttttttttgagatggggtctcaggcttttttgagggcagtgatgatcacaggtcactacagcctcaacctcctgggctcaagtgatgctcccatcttagcctccagtgtaggtgggaccgcgagtgtacaccataaaccctggctaattttttttttttttttgtattttttgtaaagatgggatctccctatgttgcccaggctgttctcaaactcctagactcaagtgatcctctggcctcagccttccattgttgggattacaggcatgagccaccacacccaggccaggacttttaatctcaattaagaacttcacatttttccatgggccagaggaacttcaaattcctccatgaggctgagactctgtgagcaacctgtgatgaaggaatttctgggacaatatgcttttcaaaaggacgctagatatctcaggtgaggccctttctcacctaaatttcttgccagccagaagactgttgtgaggatgtagtgactggtgagaaagtccctgacgttgggcaatgtgtggcttttctatcaacacgggagttttaaaaacaaaaaagcctctgggaaagtgctgtcaggccttccctggcaaggcagtgaatggcactgcagctctgcaaggaccaaggctagagatggctggctttggggacactcccaagtttggcctctgggctatgaaggacacaccaccagtcaggggccaggctgggcctggaagggacatctccagaaaccatcccacaggactctgactctggtgcccaggggagtagcaaaaaaaatggggtcttgggagaattcaagtccttagtgctaatggtgatgacattggtgatgttggtgatgattatagtgatgatgggcatttcctacctgcaagattcagggccaggcaactgactttacatgaattgcattatttcattcaatccatcctcacaagatccctatgtggagcagtaccattgctatccccactttacagatgaggaaactgaggctcagagaggttaagtaaatgaccaagggcacatagctagtttgcaccaggattcaaatctgaatatactggagtccaaagtacgccagcagcctgtaagtgctggaaaaaaggcaagtaacattggctagtgcctttaagggatatatatttcttattcccattttaacagaagggaaacagaacagagcgcttagcgtattctccatgaggtcaggcactgtgccaagcactgtacatatattatctcctcaatcatcaaaacatccctatgaagttggtggttttttggtccccatttgtgtagatgaggaaaccgaggcccgagactaaatgacttgctgtggttccaaatcaggcagtgtgactccagggcccacgctcttcaccccctgaattgctggatactggaacaagatgttccagtatccagatgcagggtctgaaacagaacccaggactcctaactcctagtctagggctctgaggctagatgcaggctctctgttggaatgcattgttccttaaaagcacactggccttaagcccaaagagtgaaatcacggcctgcggttctgggaacctcagactggagaaggaagcttttgccctggtgttcaagtctcagcaggtgtgctggggactctccctctatttccttctcccgctggaagggagcccttgttaggtgggcagggtggggcagcccttatgagtgtagggtgggaggagggcaggaggcaggcgtgcccaataaaacagacctaaagcttcccgccttcttgccttcatccaggcagtgccctcatctcctgtttggtaaacaacagggcatgatgatgagagttcaaggttggagtcaggaggtctgagttctggttctggctcaggcagtcactccatgtacacattgacagtcagtttccttatctgtataatgtgtggtggtggtggtggcagagaatcaaaattctccagctttttcagttaacacatcatctattaagtgcctactatgtgccagaaacggcagatacagcaagtgcaaaagcagatttaggccctgctttcatggtgttagagtcttgtaaggagagatacaaagattaagtcttcattgcaacaaatgtaaaacggcaactgtgaccagcttttagagaaaaaaggcctgctggtggagctaagggagcccatgatggtggaggtggaaggagaggaaatggcttgacagtccaaggggtaatagggaaagatgccccgaagagattactaggtgagtggcaagcccgttgtgagcgggcctgcggaggctggcaggagcccagccccttcatgcattgtgggcattggtaagagaactcattggagttttttgggggaagggtgctggggacgatggcagagagagatatatgatcaggtttagcacagaatataggcaaacgcacccttcaagtaaaagataaaaatgcctcctcctccaaggagacttccttgatttctttgcttttgatctatggtatttctccctccttctctggccttgtagcctgggtagagaaacagtcctccaggggagtaagacctaagctttcccttcctgcaactgatgtgcgctgtagctttgaacgaggtcctaggtatatacatacatacatacatacatacatacatacatacatatatatatacatacatatatatacacatacatatatatacatacatatatatacacatacatacatacatatatacacatacatacatacatacatatatatacacatacatacatatatatatatatatatatatatttttttttttttttttttttcaggagggatatgaagagtgacttacaggcgcccgccaccatgcctggctaattttttttgtattttcagtagagacggggtttcaccatgttggccaggctggtctcaaactcctgacctcaggtgatccacccgcctcggcctcccaaagtgctgggattacaggcgtgagccactgcgcccggccttcgaacgaggtcctattccttctcgagcctcagtttccccagctgtgcagaagaagcaggttgtctcgcaggacccgcccagcgctaacgcaacgtgattcgctctggcaggagccgggggctgcccgcattgctgcgcaggcatcgggctgctggctggggcaccgccacctggctgcctgcgctttaccccttgctgagggctgcgtgagctggtcgcggcgccagacacggcgcaggaaagtgggtgagcgacccccggctcccgcgggcgccgcgcggccccgcccccgcagctagcggccctgcggcagccgggggctcgagctccgccctccgcctcccgccggcctcactccctcctccctcctcccttgctcgctcgctggctccctccccccgggccggctcggcgttgactccgccgcacgctgcagccgcggctggaagatggcggggaacgactgcggcgcgctgctggacgaagagctctcctccttcttcctcaactatctcgctgacacgcaggtacggccggctggggctgcgggcccggggccaggggtgctgagctgcgggggccgcagctgcagccgcggaggccgggaggcagcggtgggagccctggggtaactgggggttccaggctgcagagccccccttccaggcgccctgcgatgcgctccgttaccggggcagggagccggaggtctcccggcgcgtgccggagcgctgggggcgctacggccgctggggagggtctagccttggccgcttggagtctgccaccccgcgggcaaaactggggggtaccgcgcttcctttgggaggtggaggcgcgccacggtgtggggtaccctcaggctggcgctgggtgctggaggcgcgccgtcagcgcccggcacttgctgccgtactttcacgtggacttgtggccccggcacgggtgcatgcccgggtctccggagtcccctagtcctccaggctgtagtccccagagtgctgttgctggccccccgcggctttctacccgcgcccgcagcgcggagtttcctgccagttgccggctaaaggcataagggtctgcggggcacgtggacatgcgggcggagacagcgtcttcctggtttcgctatcgggcggagccccctggggggaaaagccaggctggatgggggcggaaggactgtctgggggcgcctgggtccccctgcggtgcgcggccccggtgcgcgctccacgatgcagggggaagggaaggcgaggcggagtcccaggcactggctgagcccgggagccccactggcgacacgcgcgtgacaggagagggtgctctggtgtgccggggcgcgggggagcgaggaagctggtggcttggagactgggagaggggtgctgctgggacaagcagccaccaaaaatgtcagcacgaggcgtgcgcggcccccaccccttcccccattttccccacccaatgcctgttgcaagcataaagtttggctccagagttagggctttttctctgggcgcccggctgcgggtcattgggaagctgaggatgcggcggaacctcggaggagccccgggtgctggcacacgcctgggcacggagaggggcggccgggcggaaccgggcgcggctcgcgggggctggtttggtacctggagtgggagcgccggtgccggcccgttttgcataacagtggaagggagggggaaggcggagattgggggagggaggtgggaggagagagagggaaactttgcttcttgttataatctgcctgtctttgggcggcagcagctgtcatgggaccgggtgggcggggagaggcttgcaagctgactccttgcggtgaaacgcgacttggaagggacgccgcagccgagacgttcagctccgggcagcgacttcgggctggcggctgggacggcgtggcgtggcagggtgtcgccgagaggaagcccgccacgcgggaggcaggccgcccctggcccgctgcagacgccgctgcgtaggggagccgcggggccgcgtggtcggtggcgggcgcgctcgggtgggttcgcggcagaggccggaggggctagtggcgtgtgattgcgcttctcgagatcgaggggaatgtgtgatgagcgggttgcgcgcgcgggtgtgtgtgtgtgtgtgtgtgtgtgtgtgtgtgcacacgccgcgcgcgccgggcgcgtacctttacctctgacgaaactgcggtggagctcccgccgtcgtcgccgggctccgtcacacgccccgcgccggtgtctgcgccgaaggcaggtcccagcctcagtacccccagagccgacagcttggggctagcgggcactgagtgcgggaggaggggcagagtcactcctgggaagattctgtccccagatctcgaaattgccctggggcgtctccgaatctcttggctgaaaagcggatgagagaggcctgaaatagccggagactcgttcagggacccatgtcaagaactgtccgctttggactgtaccccggattttaactcgatcttcagtgtttggctcagcaataattaattattttgccctttagccgcccagcgagcctagctagcagaaatatttcaactaaggaaactagaaaattgaatactcaggtgtttgcaggagcagtgcagtgaaagttaatctgggacatttgctttttttatttaaccacatgacaggccgaggatcttctggtgatctttgccggcccaacttgggaaatgtaattgataggatgagctttgagccgcccctagaaggctcggagagcccagccggaagaggacctgggcgggcccagtgtgctcctccttattttacagctggagaaagaggctgcgaggagtgagcggcttgtatgggaccatgcagccagagggtgacagagccacccagggctcctgactccaggtcctgtgtgttacctagaaatagcactggacttggagtcagaaggcctgagtggagtcaccttccccactctctggctgggtgaccccggagcaagccatttgaactctccgagcctcatttcctccatctgtcaaatggggctggtggtgccgcaagagaatccaatggcctggtggtgggggtgagcagtgtttgcatgtgagatgttctggttgttcctgcaaccccctctcctcccccaaactttccctgaccctcccctccttcatctccctttgggagctttggggaaagtggattaaatggtaattcattgtctttgtcccaaaagattgttgttgtctttggtggctaatccagggttagattagagggaggacttctgtttaggagacttaacttttacccattggggccaaagtacggaaatttagcagaacaaggattgcgaaagtttcttggaaagctttgaggcatggatcccaaaggactgtgggtggcttcacctttgttcaggctatgcccctggcccagagtaccctcactcacccgtcctgcatggccttctcctctactaggctctcccagcccagcttgccctgctttctctcctttggttttctgcatctgtgtgatacaaccaagcactttgtgtgagtctggtgtccagtaagattctagcactagggttgtaccttttatcattgtgcctgcaaggcacctgtcagtatgctgagctgtgttcctttgcttagctcttggctaggcacatggattacagacaggggtgcagctgggtcctgccaagcagaagctcccaggctagcaggggagacagctgggcagcgagtgtgggagagaggaatgcagagggctgcagctgtgggcaaaattttagaccccaaaggccacacagcaagtccacactaaatatgggctatttgaagttgcttagggcatcagtcatagatgcacaaaatgtcagagttggcagcgggaatgttagaaatcatcagttctaacaacttatttaaaaatatttaattatagaattgttagaaaatactgccaagcataaagaaaaaaatgagaaatatgtaacatgacccaaagataaccacttaattgtcatgtatattccagactgtttatttcctgttcatatagatcacatcttatttttaaaaaatggagtcgccgggcacggtggctcacccctgtaatcctagcactttgggaggccgaggcgggtgaatcacctgaggtcaggagttccggaccagcctggccaacatggtgaaatcctgtctctactaaaaatacaaaaattagctgggcgtggtgacacacacctgtaatcccagctacttgggaggctgaggcaggagaatcgcttgaacccgggaggcggaggttgcagtgagccgagatcgcgccacttcactctagcctggacaaaagagcgaaactcattctcaaaaaaaaaaaaaaaaaaaaaaaaggagttatcctgaatatactgatttgtaacttggaattgcactgttctgtaacttgtttttttttttcctcttccaaacaatatgctgtgaacatctttccacatcagtaaatattctacttagtatcttaatgattatataatgttttgttgaagattgaaccgagatgtatttaattaatcctttatcgttactcatttacgttgtttaatttttttattttgctattgtaagcaatgctaaaacgaatatctttttatgtatgtctttgtttcttcctttaagttcctagaagtgaaattactccatcaaactcattcctggattctcttctagaaagattgtacttatttgtgcactggcatggtctgggaacacctggtttcctatacccagataactgttgatattttcattgtttttcatttttaccagtctgttcgtcaataaattctgttacccttattgttttaatgtgcatttatttgattacttgtgatgctaaacttcttccccatatgatcatgggtgacttgtggttctgtgtttctgaacttggcccattttgcaattggtatcttgtctcctcgttgttctaaagctgggactgagcacccagaagggccccctgccacatggagaactgggaaaatggctccacacaccccttgaagccagggccaacttctttttcaaatcagtttgtagatttggacaaatgtatagtgtgtgggagaagattgaagcatagccttcactgggtgcatttgcccattctttatctgtgtgagacttagggagagtaacttcttcacctgagccagaaggggtcatgttcaccagagacctgggctccactttcattgggattccctggctggtgctaatgatcaggatgcctgtgaaacccaggaagggcaatggcccagcagctgtgccccacgggctcatatttcctctttaccttagggccctcctcttagcagctcgtgcaggccaggcagaagttccactatgccacgtgagtcaccctcttccttcttcctctggaataatagaagaaagactggctcgagtgagaagcagtcttgcaaagggggctcaggcttggaaatgcctaacaagaatattgcagtgttgatccttgccttctccttcatcgtcatcatcagtgacgtttactgagtatcccctataccccatgcagttttctgagccttctgtttgcactactacatttcattctcatagatattgtgcaaaatgtaggtgctgttgcacagctgtacagatcttacagtttcagagaactcactgacttgtggaagactaattacctttgagtaagtagaagagccagcattagtgggcagtgttcccagactatttgactctaagctccttgaagacaggggctactctcagtttttgttcatcagtgtttttctagcaccttgagcaaatgaaggcacatagattgtatagagagaatgcagaggccgggtgcggcggctcacgcctgtaataccagcactttgggaggccaaggcgggcagatcacgaggccaggagttcgagatcagcctgaccaacgtggtgaaaccccgtctctactaaaaatacaaaaattagccgggcgtggtggtgtgtgcctgtaatcccagctactcaggaggctgaggccagagaattgcttgaacccggagaattgcttgaacccaggaggcggaggttgcagtgagctgagattgcaccactgcactccagcctaggcaacagagtgagactccatctccaaaaaaacaaaaaagaaagaatgcagaacaagtccctctgcttctctacgcctgtttttcaatccttgaaatggggataataggccctctcgattgggagtgaaataatacagtatatctaaaatgagcattaacctgctactcatgaaagttggaataattctctctttgaagcactttagaaggacaggattaagtatggagctaattttcatgcatgcaatctttttttttttttgcgtaaaaaagagaagcataattcttattagagagtgaagggtacccaaataaagtcatttggaagaaaatgatcagggtcagtttctatctgtcctcctacaaggtagtcggagtgcctcatatccatcccattgacactcagctgatgcagaatcgattggattgatctttctgttcttctccccttctgatctaggtttttgtctgtttgtaactagattcctgcagttactaccaaagagatctttgctgcacccgactttgtcttcttccatttgcccttagcccagatggcagatcagtcctcttagagtgcatatctgacatcactctcttgctcacacatctcccatggctcctcagtacatttttttttcttttaagactttatttttttagaacaatttcaggttcacagcaaaattgaaaggaaggtacagagatttgccatatacccttgcccccaacatgcatagcctcccccattattaatattccccaccagagttgtagatttgttataattgatgaacctacattgacacatcattgccaccccagagtctgtagtttacattagggttcactccgtgggtttggacaaatctgtaatgacaggtatctaccatggtaacatcacacagaatagtctcactgccctggaaatctgctctaccttttcatttcttctgtcccccaactcctgacaaccactgatctttttaccgtttgtacagttttgccttttccagaatgtcatatagttggaatcacgcagtatgtagtgttttcagattggcttttttttcacttgctgataggaatttaaggttcctccatgactttcatggcttgatagcttagctctccggtattttaaaattaaagcctaaacttaaacctgatttccgaaggccttcgggtacttttaagttggagagttaggcccttgactttgtcttgagctgtctgcttttactttgggatcctgtacctccccaggaaaaccctgaattttcctcctggaggcttagactcaggctgcccttttctgtgtcttccttctccatttccatgattcatcctgcgagcccctgctcaccagccactgttttggcgatgccctctccctcacctccaagccagctgttccatcttctgtgtggcagtacgcagggccagcagagcactgaccttggaatccccttactgggtttgagtcttggttctgcgatttgccagcttcgaggcctttggcgggtcacataacctttctgagcttctgtttcctgaagtgagaagatatgatgattaagattgttgtgaagaggccgggcacagtggcttacgcctgtaatcccagcgctttgggaggctgaggtgggtggatcacctgaggtcaggagttcgagaccagcctggccaacatgatgaaaccgcgtctctactaaaaatacaaaaattagccgggcatggtggcgcatgcctgtattcccagctacttgggaggctgaggcaggagaatcacttgaactggggaggtgaaggttgcagtgagccaggatcacactactacactccagcttgggtgacagagtgagactctgtctcaaaaaaaagattgttgtgaagagtcagtgaaaatcgaatgacaacatggatttaaagcatgtaacacatgcctggcacagaataagcaccaaataatagatatatctcttcatctatagatcatattaagtgttaggacatcactcctggacgttaagctccacaaaggcaagaattttcgtttatttcatccaccttgtttttcaccataatgaatagatcagtgcctggaatataacagacatttaatcagtcctcattgaatgattaggaaatcactcctggacgttaagctccacaaaggcaaggattttcgttcatttcacccaccttttgttttcaccacagtgaatagatccgtgcctggaacataacagacatttaatcaatcctcattgagtgaatgaatatgctagactatgagcctcttcagggcagacactgcttcttgttttatatcttcagtctgagtgttcctgagaagggatggaatacaagtctggtggaatgaactggaatgtcctctccccgccaccatccctgccattttaatgtattcatagcctacctgaactttaagccccctcttgaaagcctgccctctctggaaagcatttttttttttttgagatggcgtctcactctgtcgcccaggttggagtgcagtggtgcaatctcggctcactgcaacctcccgggttcaagcgattcttctgcctcagcctcccaagtagctgagactacaggcatgtgctaccacacctggctaatttttatatttttagtagagatggggtttcaccatattggccaggctggtcttgaactcctgacctcgtgatccgctcgcctcggcctcccaaaatgctgggattgcaggcatgaaccaccgcgtccagcctctagaaagcctttgaagctaacttcttctgcttccaccacccacgtggcttgtgccacttactatcccatggtatctgagtgtgcttttattcctacaactggattgaaagctctgggaggacaagaaattatttttatcctggactagcagtgtggttgcctagaagagcgttttataggtttcaatgtcaggttctctgaaagaactttgtattttaaacatttgactatggaaaatgtcaactcatacagaagtagacagtagagagaacagtatggtgaatccccatccctccatcacccagcgtccactgttaaagacttgcagtcactcttattccatctccatgtacaagacgtcatttcatctgtgactatttcgttgtgtatctgtgaagagacttctgagtgctattgcatggatttctcccaataactgtgagactggctttccccattttgtaggtgatgaaactgaggtgcagggaggttaggtcagttgctcagggtcttgaagctagtgagcggcttacctgggatttgaaccttgactgtgagcagctccctctccttccaggcttggggcagggggcccttggagatacaggtacaccttgccatttccagaagagaggaagctgaggtccagctgcttggctggaggaagcccaggcccctgactccctggcaagttcatttccagtgtcaggtcttgcgaggtgcggtgggccttagctcttggggagggccagggtgggtagtcctctgagagacaccattgccctgagtggctgggctttggatggccgtgggaccctggggcaaggtctaccaccacccctggacagactgcattttcttcctactcttgtcattcctaaatcccaaaggtcctccttgcagctgaccacgagttctctcatgagatgctcaggactacccagtgagggagagggagccaaggggtcagcagctgggttcacagagctcagagaggaggggcctggcctgaggtcacccagctggcctgggcacagggttgacaggctcttggtggcatctggacccttgggctcccaccctgctctttcctcaggatagagaccgaattgctacccagatctggagtaggagaccagagacgagacctgagagactttcacaaatggtgggataaagccattgattaactgtccccaaaggcctgtgatgactgtttggtgttttaggtaagaaaacaaacatttgccctaattgtttgcttcagtgactgagagggctgtgaattctaggatggggttctgcttgggcaaagccctgggagcttggcagagaatttcttttggccttctttttctatctaggaaatggggacgatagtagcatatgctttgaaggcttttagtgaagaatagttgaggcaatgtctgtaaagtgttcagaaatgctcaatgagtagtaacccttgttattatgaaaaggggacacatgtaatgcagaccctgccatttgtcttccctctgagctccaggtccttgatctagtcgaggccctgaggttcttcttgcagagtgttttttcctctctacttgtggggcaggtgacgagggatcccatccagccttagcaagtgttgcaatactgacttaggaaaccacttctagtgagatgccacttgaagagagaagaaatacccaatagtggttaagagctctaggctttggagttttaactgcctatggtttaaatcagtgctctaccacttactagctatgtgaccttgagcaagtatcttaacttctctgacctcagtttcttcatatattatcccccaaattggggataataatagtatgctctttgtaggataacttaagatagctgcagataattaaggcttgcagcttcacctgacatatagtaagcgctcaataaatggtggtcactaggatgatgacaacgacaatgatgtaaaaatataaaacacacaaatgtcaatttgagctttctgggagttgggagtgccttagagacgatcttgcttaatgcccttaccttgaaggaaggaaacagactagaaacagatcagaggatgccttcaggtcactcagcagaggcaagacagggccctcggctgctgtctgcttggccgggctggctctgagtagctgggactcaactgtctgggacccactgtctgggaactcagccgggtgagccctgcttggctgagagatggatgctccccgacagctctgcagccgtattttttccctgtgattgcctggcagaacatagtcatttagcagagggaatgcgaggagatgttagaaaccaaccaggccctgagcagttgcagcagccggcccacgagtcgctccctgatgttgccatggcaaacagccttggcaacgtggctgctcgcgcctttatttctggtctcaggctctttgcaaggaagtgtggtacccagaacactggggagggccctgccctggatccttggcactgagggcaacccggcctttatgctgctagcagtcccaggccacagcagcccctgctcaaaacacctgcagacccaccctgcctttgcagaagcagactactgggtatgggatttgaagcctcaaatgtccatgtagctcactatccatctatttgtcaaatactgtgtttggcaatgccatactgttcccaccactgcaagagcacagccccaaaatattcttttttttttttttttcgtgagacagagtcttaccctgttgcccaggctggagtgcagtggcgcgatctcagctcactgcaaccccctcctcccatgttcaagtgattctcctgcctcagcctcccgagtagctgggattacaggcgtctgccaccatgcctggctaatttttttgtatttttagtagagatggggtttcaccatgttggctaggctggtcttgaactcctgacctcaggtaattcaaacctctcggcctcccaaagtgctgggattacaagcgtgagccaccacgcctggcatagccacataatattcttaacatgaaccctggtgttaaaggttcccaggcaggtgtcatcttcaaccatgtccttcaaggatggtgatgatgatgatgatggtggtggtggtgataacagtcaacaactgctatatccccttcaagagatcaggccctgtgccacatccttcacatgtgtaatcacatttaatctcagaggaaccccatgaggcagtcccactgctatccccattttacagttgggtagacctaggccaacccagagtttgtggtgctggtgctgttctgcagctcctcccctataccaggcaaccatgggggccccgccatgaagtgtctgtcccctccctgtgcccctctcccatctgcacctgcacactgcaaggctcagctcaagtgatgcctcctgtagttccccctctcagaactggccctttttgctctgcgatccccacagtctgctacagacactttctgttccctgccttccctcaatactctgccactctggtgagtttatttctgccctccagccatcccaaaacaaaacagaagggcagactggctaaggaggagagctctgactgtgctgaggagtttggacttggcaggcagtggggagttggcaaagagttttattattattattcataacagtaataatataaaagagccaacacttagagacttattggtatgtgccaggtactaagctagggccattaggtgctttaccttgtttaatcaactaccggtgaggttggcagtatggcaaatgagaaaacagacttggagaatttcagtgacttccccaaatcacctagctaggaagtaggctgggatttgaacctaggtttgtctgacttcagagcacatggtcctaacaattgcagtggtggctaatttggctaagcacatagaaggactggaatggtgtaacaggaggcatctttggtgtggctggggtgggtggtggggcccataccctgcctcagctgtggggctcagtggaaatcactagatataggtaagagggcagggggctcagagtggtgccctcatagccaagatgggggtgcagaagaggatttatatggggagaacatccatttattcagggcccactgtgtgccaggtctgttccttactctggccttccctggagcctggttaaatgtaaactgtagcctcagccctttataacctttgtttatgtgtttattcttttttttttttttttttgagacagattctcgctctgtcgcccaggctggagtgcagtggtgtgatctcggctcactgcaacctctgcctcctgggttcaactgattctcctgcctcagcctcctgagtagctgggattacagacgcccaccaccacgcctggctaatttttgtatttttagtggagatgggatttctccatattggccaggctggtctcgaactcgtgacctcaggtgattgcctgctttggcctcccaaagtgctgagattccaggcgtgagccaccgtgcccggccctatttattctttactattccctcttctctacccagttgggactggagctcatcaagctggttttccatcaaatcccagtgacttaacagtccctggcacactgtaggcccccaataaatagttgttggatgactgaatgatgaacaaatgctgttcgatctttcacaacatttgcctgatgtttgcctggcccagaggtccttctttgtgcctggagacgtgctaggatgtgtgggtgaggtgagtgtggcagcattgtaccagtccccacaaggagtcacctgcccttgtcaccaagataagtcttgcacacgaaggatcaaaggcaaacactttgtggagcctccagaacccactatcagaatacacctccagtgcacagatctttgtggaatgataaaccactgctaggaatccagtctgttccagggcatggctctgcctcaactggggaggggctcagagttttgagagtcttggtatctgcagggaggtgtctggtcagatgtccccacatcttcccgggggattgaaaccagcactttacactaggcctcatgcctatgacccacccacttactccagagagactaggcaggctgcctgcactcatgaggaaggaagagaaatccagggaggtgaaggggcaagagaggacttggggaccagtgaccacagtgcccagcccaagaaaatgaacttcaggctgcgtggatcttcccttgcttagaatctcctcatatgttgcacctggcacctttcctgcctagggccaattcactcttagtttgcacatggttcttacaagcttggcagtcatgtcaagcaaggcctcatgatatgagaagcagcacattggttctgttagtgtgtgcctatgtaggcatggggtgagaggtgaggatctaccagaggcagacacgtggactgcagcaccgaagccagcttggggccaattagtgagggggctgaggggtcctgcacacctgtcttgttcctgaatacattactatgtgaaagcgcaaagctcattggtgaagacagtgtatcgtgtctgaggaaaggtacattctgttcagtgttctccgagaaagcaagaaagtgtgaagtacattttggtattaccatcaaaaataggaagtctatcaaaagcaggcaaaagttttggcattccaagttatttataaagtttgcatattgttagcatacataattccttgatgaagccagatgaatgagttagtctagccataaagctttctttgaaagttaatgcaatctctgaaaataaggtgttgtcttttatgtttccaaggctgcttaaggtagcacaaagagtttgtagctcggcattagataagtgctgattggcctcaagaaacagtggcacttgcgcttagtgattcataagagcttgggctttagagtctggttcaaattttagctttgtgacttttttttttttttttttgagacagggtcttgctctgttgcccaagctggtgcgatcaaggaggctcactgcagtctcgacctcttgggctcaagggatcctcctacctcagcttccccagtagctaggactaaaggcatgtgccactacacctggataattttttactttttttagagatagggtcttgctatattgcccgggctggtctcgaactcctaggctcaagcgatcctattgcctcggcctcccaaagtgctaggattacaggcaggagccactgtgcctggccagctttgtgactttttagttgtgtgatctaaggagttagatagctgctctgtgctctagttagccagctcccaaatgggaatgataataggacttacctgccaggcttggtagaactaatcagtggttctcagccatgagtgcacatcagaatcaactctgtagtttaaaaaagtcataattacacatctggggctgtcccagacctatagagtgagaatctttgagagtaggcccttaagcttctctgtctttaaaaagctccctctgatgacacccctgctttggtactaaaaatcaggtactattcatagagtgtctgtcatgaactctgccagttccctcccctctctctttcctgcctcagtgtggggtacaggctagcatttaggatgaatgaccagggaacagatcgaaagcctctttataataatgcccgtggagagcagggcaacttctttatcaggcatttccatttgatcttcacatcaatctcatgtcatagggaaaagaagtattcccattttacagatgggaaaatagaggtctagagagtgacttggtaggatcctgccggtaatcagttttcaaatattcgtcttggtccctgtgtttgtcctccttgatcctcaatcccacacccacttatgggtcagctcataggaggtggggggattaggattactttatgagtgaatgggttggaagagaggaggaagaaggcagcctgagagaacacaagtcacctgcagactcccagaggccagtgacagtttgatgtatcaggccccttaaagatcagaggggtgctggtcatggtcccagaccatgcagtagcttagaggtagcaacaggactagaatccatttctgatgcctgattcactgccatcccagctctgtgtgctgcttccacagtgtggtcagggtgtggctccactgataatagaattagtcttctagctagtgtagtgaggcctttgcacttgctgttccctctgccggcaacgctcttcccaggcattgccatggcttgctgcttcctcacctccttcctgtcctgtcaggtgtcatctcctcaaatgaccaccattctactttctgtctctatgattttggttgtgacatggtttctcatacaagtgggatcacagtatttgtctttttgtggctggcctattttacttagcatagtgtcatcaaggctcatctctattggggcaaatgtcaggatttccttcctttttcaggtagaataatatttcactgaatatgccacattttgcttatccattcatttgttagtgaatacctgggttgctttcacattttagctattgtgaatgatggtgctatgaacatgggtgcacaaatatctcttggagaccctgacttcaacccatttgggtatatgcccagaggtggaattgctggattatatggtagttctattgttaatgttttgaggaaccaccatactgttttccatggtggctgtaccatttaacattcctaccaacagtgcacaagggtcccaatttctccatatcctctctaacacttcctgttttctgtttgtttctttaaatagtagccatcctaatggatgtgaggtggttatcttattgtagttttgatttgcatttccctaatgactgagcattttttaatgtgtttactggccatttgcatatcttctttagataaatgtcttttcaagtcatttgcctgtattttaaaattgggttgtttgttttttgttgttgttgacatttagttctctttacatttgagatactaatctcatcagatatgatttgcaaatattttctcccattctatgtgttgcctttttattctgttgatagtgtcttctaattcacaaaattaaataattttcacgtagtctaatttgtctattttttcttttgttgcctctgcttttggtgtcatatctaagaaatcattttcaaacccaatgtcaggaagcctttgcctgctttgtttttttctaagagttttagagtttgagctctttcatttttatctttgatccatttggagttaatgtttatatatggtgtaaggtaagagtccaacttcattccttcgcataactgaatgtgtcttgaatgagtgagtagttggctaagtccttaagctgtacaggctgccgagctcacctaaccctcctaacagtgtcaggagaaaaatacttttagcaccattcttcacgtgagcctgatgctcagagggtgagtgtggggcttggggacatagctcctttgctgaccaagccacacagaggtccccagggcccagcaggcaggcatgaccagggccccgccccaaaatatcatgccccagtgccctagtggcctcatgccactttctccttggggttgggcaacagctcctccctgccctgtgggtgtggacaccaggtacctgcccagcagcgcctggggcctccagcctactccagcactgctctttgtcccagtggctgaaggagtggcagcctggcttgtactttctggtccagccccaacaggaatgtggcaatctcctcccactgtgcctgcatccacacctccctggtggggtgggggtggaccatgggcaggcaccatagcaggcaaaactagaggacagtgatggtgtcttgggtggaagctgctttgccagaggcccatctcctgagaggctagagcaggcccaggttggtgaatcaggttccagggagagcagggtggggttgaggagtgggtgaggagccaagcaggagagggaggtggaggtttagaatccaccctaagaggagaagaaagccctcctttgctcagctggcctgccagaagattttcaatgatatggttgtgaaacaaccagaggaggggcagtaccagccggttccaggtgatgagcacagcccagggtctgagggcaagtgggaggcacacgagaacagtgaagaacagagctctgagtcagcctgagtccagggtctgtcagttagctgctgacttagggcatggtacttattctgcctgggccttagtttcctcacctgtgaaatggggtgaagagatatagatatagatatagatatagatatagatatatctatatatatatatctcagtgggtagttgagttgagaagatgagaaggtacaatgtctgaagagcttagtgcagtgtgtctgggtgttatgatcaataataatgacaattaccagtgaccagatggtttggtgacagtttagtggaggaagccgtgcagcagtcactccttgtgcacgggaaaccagttgcagatttgagcaagccttgctccctgccctggatgaacagatctgctgatggccatggaaggtgcccagggcagagtgtcaagacaacttttgcagcagaaagggtattgaaggatgagcaggagctggccaacatgatgggaggggcctcctagccagggaccaggctgtcgtgatggctagcatatcatgtggctgatgactgagcaatgagtggctaggtgagaggcttgaggggaggctctgagctgactggaggactccccatgggggtgaggaacagacagcatgaacgaaatgtctggaagaatccaaagatggaacaccaagattctcgtccgagaaactagctggaggctgctctgcagaaggggaaaggccttggggaggtttcagaaggagagtgactttgagggtgactagttcttccctgggcctcacaggcagcatgggatgaatggtatcaccctgtggactgcaccgctcctccccaggccctaggagtgagtgggggacatgcagggatttgtgttaaggattgacacaaaggctggggtacagcttctcatatgtagtcctgactcaagtccctggctcaatacagcaggaatcggtggggccaggcaccacagaaccactaggtacagccctcaataaatttaatgatgcagatgatacttagtgccatcataatgattattactcctatttaccgttatacctgttagtgtgtcactgcgaaattcacacagcattttcacatccacagttcacatccttgtgaggattttcatttctgttttgctgatgaagaacccaaggcccagggatgtgaagtgacttacccgctgaggtcactgttgtaggaactggacgggaatgtgagacttgtggcccttcagatctgcctggttgagaagagagatgttttttgaatggagcccctccgctactgctgtctgagttccctgccttatcttgaattctttttggagcaatgatctccagtcttttcggaattgccacatctcgccattgtatgattttgcaacagttgcaactgtgaaacgcccccagaaaactgtaatctccattgatctctatgtaatttagagttagggaagaggaaaatcttgttttttgcatctgtgctggaaagaagagtgtcatggtgagaatattgtacctggagtctggagggagccctgggctgttcctctttgctgtgtgaccttggacaggtctcgccccctctctggccctgagtttcctaatctctgccatcctgtgactcattatctttctaaacgtgagctgttttaaagtgtcacaagtctgggattgtgaatcatgggggctgttttgctttggtaaattctgcttggagctgaaccaccaggtactggatagagagggagactagttcctggagacagatggacagatggagctaggaaacagtctcatcgcagatggttaatgtactttccctgcacccagtgggtaatgtcagtgtaggttcttaactccccaggttatggcccctttcctggtgacaggtgcaatgctgacttctctttgaactgtaagttggaagaaatttgtcatgggatcatgtgccttaaacgagtgggtttggaaggaggagaaggtggaggaggaactccaggcaagagaatccctgatttccaacctccccagtgaatcacggaacattggataagtcattcatgggggtggaaagattgggtgagaattgggaacttcaggccagattttttttttttaaaggagcaagtcattcaaaatcctctactgacagatgatatctacaataatttcttccccttttccacagcattattttatccaccttgaatcattttttaaaatctataaaacaaactttcttttagctgtcttctctgttttagttaaaatatatatatatatatatatatatatatatatatatgttaataggggaaggaaggtgtcagtgaatactcagataccccaggggtctgcagacttggctgtgggtgctctttgaggttcagaatggccattcttgggccccagcccctggtgtctttcacacagagctgcttacagagccgctgctggctcaaccatgaggtctgtaattatttaaagaaagctcacatcaagtggaaaaagagtgaaccacatttaacgtaccatgtggccaatgggcaattcaataccaaagccatccgattatctctggcccgcaccagctgctggattttgcagccgggtgcattaggtgaccatgggactgaccggcaggtccaagtacgcacgatgggtgcccgtgcaggcagcctggccaggcttcagcctggaagacaggatctgtgtacatccatagctgtgctctgagctttacagaaaaagttaatgtaaaagcaattttgaagagtaaaaaagaagctaataattatgaaattcaaaacttaaatgttttactataacacagacagttgtttaattgcactgtaatttatcgttaataccaaagtattttggagaaataatcttagattccttttacttttatattttggttgttttgtttagcaaatgtaatatggattttttgaaaattaatatttaaaaattttcagtattagggactaatttgtcagagaaagtaaggttatccccaccctgccacttagcagtttagcggttttaaatgcctttcaactgaatatgggattatctctttttatttatttatttacttttttaccttttctatggtgctgatcttctatgattatataaattgtattttttcttgttgcaaaaatgatatgcattaatttattgaaatgtgagagcatacaaataggtaagagaaagtaaagaaaactaatcccggccgggcacgctggctcatgcctgtaatcccagcactttgggaggccaaggcgggcggatcacctgaggtcaggagttcaagaccagcctggccaacatggtgaaaccccgtctctactaaaaatacaaaaattaaccaggtgtggtggcacacgcctgtaatcccagctacttgggaggctgaggcaggagaattgcctgaacctgggaggtggaggttgcagtgagccaggattgcaccactgcactccagcctgggcgacagaggaagactctgtccaaaagaaaaaaaaaaaaagaaaagaaaactaatcccagcacccagaaataaccagtcataggcagtgcttaagaaaataaaggtaacattgtaggtttcacttctccccaagcttctctccttgggcacacttttctcacctctcagcctccttttatgggcggattcctacctgtgaccttgagatggggagaacatagacggtagtcatagtttaactatctcctcctttataaaatgggaacagcaatccctgcattgctgtgagaatgcatgtataatggatctgaaagcaaattgccaattgtagagtcataaacagatgtaaggctatgttgctacttccctgtgcatgtgcctaccacagctgctgatattgctgcctgttttaactcagataataccaggtttagacaatatctgatcacctccaagtacttcccaggctttaatcactcccgaggtttggcttttagtctacatactatgtaccgcatctctctacatgtccgttaatatgtacagaacaagataaatacccttgctggtggggaaggcatttaaactcagccttcctgatttagaatctattactcagtcgggctgtttgaagtgttaactgatccaccttgtgattcagactgcagtcggagcagaaccaaggggaagagattggtggggctcacgcagagcaagccccaggaagacccagctgcctggcaagctcattttcctactagtttcagcatacactgtggttcaatgtgaaagagacaatgaacttgcttttgtatttattttgcaaatgtaacacagaccctggtttaaaagattatgttacaggccaggcgtggcggctcacgcctgtaatcccagcactttgggaggccgaggtgggtggatcacctgaagtcaggagttcaagaccagcctggctaacatggtgaaaccctgtctccactaaaaatacaaaaattagccaggcgtggtggcaggtgcctgtaatcccagctacttgggtggctgaggcaggagaatcgcttgaacccgggagacggaggttgcagtgagccaagatcgtaccattgcactccagcctgggtgacagagtgagactccatcttgatcacttgaagtcaggagtcaagatgaaaacataaacaaacaaacaaaaacattatgcatgttacaaatggcagtcatcccttgcactcacattcttgtgtttccatccccagagcaaccctctactaatttctaatgtgttcttccagaggtaaaccatacaaacatcgcatatatgtggtctaacttgctgcctcctgggtttttattttttgttttttgcacaaatggtagcaaactaagggcattgttgtgcaactttttttctacttagtatttcttaaagatcatttcgtatcaatatgtagagatctgcttcactgtttggattgatcatagtttgtttaactagttgggcatttaagtgattgctatttattttattttatttcgttgagacagagtctcgctctgttgcccaggctggagtgcagtggcgtgatctcggctcacagcaacctctgcctcccgggttcaagcgattctcctgcctcagcctcctgagtagctgtgattacaggcatgtgccaccacacccagctaattttttatatttttggtagaggcagggtttcaccatgttggccatgctggtctcaaactcctgacctcaagtgatcctcccacctcggcctcccaaaatgctgggattactaaaggcatgagccactgtgcctggcctatttatttatttatttttagttaaaaaaattttttttaacctacctcttacacagaaataggttatttctaattgactactgctgctagtttgcagtaagttttgcacacatgtgaccgtatgcataggataaatgcctcagaggggaattgctcagttaaaaggtgttgtgtatttatttatttagttagattttttctgagacggagtcttgctttgtcgcccaggttggagtgcagtggtgtgatctcggctcactccaacctttgcctccccacaacaagcaattctcctgcctcagcctcctgagtagctgggattacaggtgcctgccaccacgcccagataatttttgtatttttagtagagacgggattttgccatgttggccaggctggtctcgaactcctgacctcaggtgatccgcctacctcggcctcccaaagtgctgggattacaggcgtgagccaccgcacctggccggtgtgcatatttaacattttgatgtatattgtcacattcctgtccgtgaaattatatcagtttatgtttctgtagaaatgcataagaagtgtttgtttcttcacaccttcacccacacagcatgttattagacttcgttgatctttgccaatctggagtctctgaagttttaattcatagtccttttcggatggttaagactcacctgtgttgcctttcctgtgaactcgtatcagttgtcgattttcttctttctgattcgtgtgttgagcttgttttattcctattccctcacgtggccccgggtccttcttgcgtgcccccctcccctggcagctccgtttggaggaggatgcctcctgggctagggtcagggtccagacctgactgcctaccctctgggtgagcttgactaagtcagttaaactctctgagtcactgttttctgctctgtgaagagaggatattagttcaacagcagggatgttggatagatagataatcagtataaaagtgtttttaaaactgtagaaagctgtcacaatataatatcacattagtatttacttggtttcaaatgagtggtaagattttacttaccttaaactttacagccaagtcatctggttaaacaggtaggcagagtgaggcccagaggagaatgggcctgtcggagtcaggtgtcagaggctgggctgacaggtaaccaggtcctgatttgtcttgctatatatagtaggagccatgtggcaacctgcagtttcttccagagcatcctgattttttttttttttttttttttttttagacagagtcttgctctgtcacccaggctggagtgcagtggtgtgatctcagctcactgcaacctctgcctcccgggttcaagcaactctcctacctcagcctccagagtaactgggactacaggcacgcgccaccatgcctgaccaatttttgtatatatatatgtaaacacacacactatatatatacacacatatacactacatatatatatacccacacatatacactacatatacatatacatatacatatatatatatatatatataatttttttttcttttagtaaaggaagggtttcattatgttgggcaggctggtctcaaactcctaacctcaagtgatctgtccaccttggcctcccaaagtgctgggattacaggcgtgacccactgtgcctggcctagaacatcctgatttttttaaaaaagtttttttttaagagacagagctttactttgttgcccaggatggagtgcagtggtgcaaacagctcactgcaggcttgaacccctgggctcaatcattcctcccacctttgcctctggtgtagctgggattacaggcatgcaccatcacacctgtctttggttttttaagtgccaactctttcatgggtgaacccctaagagccaatacttcagagctgaaagatgtctatgttggaatctcagttctgctagctgttagatgtaaaccctggactgtggacttagcctttttgggccacggttgcagaagatggctgaaacagtgcgggagtccttcttgtctgctgtagatgttgttgttgttattattattattattgttattattattattattattattattattattgctttttttttttgagatggaattttgttcttgttgcccaggctggagtacaatggcgcgatcttggctcactgcaacctctgcctccagggttcaagcgattctcttgcctcagcctcccaagtagctgggattataggtgtccgccaccatgcccagctaatttttgtatttttagtagagatggggtttcaccatgttgggcaggctggttttgaactcctgacttcaggtaatccacccgccttggccccccaaagtgctgggattacaggggtgagccgccgtgcccggcctatggtgtcattgttgctgcttggctttgcaggaggcacagcggcagcagtcagggttcaagaccttgctctgccctcgtttgctggttgtttgaccttgggcatgtgacttcacccctctgaggtaatgtaggagtcccatctatacagggtggatttgaagtatcagtgggctttttatatagagtacttaccacataggaggcacttaataaatatgctatttaaaaattcttgacagggtgtggaggctcacacctgtaatgccagcactttgagaggccgggacgggtggatcacttgaggacaggagtttgagaccagcctggccaacatgatgaaactccatcttacaaaaattagccaggtgtggtggcaggcacctgtaatcccagctacttgggaggctgaggcaggagaatcacttgaacccaggaggcagaggttgtggtgagccaagattgcggcactgcactctagcctgggcaacagggcaagactccatctcaaaaagaaaaacaaaaaacaaaaaaccaaaacaacaagcaaacaaacaaaattcatactaaagtgcctgttatgtcctggcactggtccagatgttggggctttagcagaatggaagcagcatccctggcctcggggaccagcgtcaggtctaaatgtcaattctgttgtcccctcctagaagctgtgggacacagagcttccctaaggagatttgagggtttttcctgcctctgtagactctgcagatcactttcagtgagattctttttttgagtaaccctaggaaaattgactctgcttgtccctcgtcccccaacaaggggtagggccttacctgactggccctcgagcagaggtgatctgaggttccttgactaggggtgtggtatgtgtcttgttcactgtccacctgagatgggatctggttctggacccctaggactggatctccttggcttattaattgttctgccaagggaagtttccttctcatccaacccctgttcagtaaccactgtgcttggacctggggatacagcggtgagccccacctcagcatcatccttcaggagctcacacagagaggcggaaaatacacaagaggatttcagctagtgataagcccttcgaagacaataaaacaagggcatgtcatgggggtaggtgggttatgctagaaagtgcggtccagacgcctctctgcaatggtattcatgctgaagctggagaatcagaaaggaagcaaccttctggggaaaagtattccaggcagtgagaaaagccaagagcagaggcatcgagtggctaagcttgtcattcgtcataaagtacacaaacgatttgtgaaaatgggatccaacgggaactacataaagaaacctggtgtgtttgagcattttttttttttcagagcaggtgatatgctagttataaatcagtgcacgccctgcctgaggggatggccaagtcagcctgggtgaggtgagtggataagtgcatttgaggccatcgcttgagctacagtatttatttgaaatgagtaaaatctacaaggcctcgataagtggcagaaccgaggccttcctgaattcagagtagccctgccagcctgtcctgacggatgagggcttcctcgttggctctccagctaatagtgtcagcgtctgcagccaccatcgacacaaagtcaatttccactcttggatctgcgatttaacacccagctgctcagagagctgcagagagtggaggtcagtggggctaactgggttgcttaatgaaagagggaggtttccagaattggaaaggcggggcccctggcagggtcatggtgcagagaaactagcgtggctagctcatggggctaagctgggaggaggaaaggggccactgtcacagggctggagcccacagacccacatggaggccttggactcccatggaccccattcccctgggaggcatttcttgtagctctaggagtttgagttctagaaaaaggccaggtgggcagcttggggcattctttggcttggattaatctctcctagtaacagcgtgagtaatggctaccttttctccctcttgcccttattccataacccctgcccacctccaaacccacacagagcgctgtctgtggttagcaccagctggaactggggatgggtctgaccatgtgagggcacagctcatggtggtaaggctaaattaaaggtcacttggccaactcgttggtgtactctgtctgctgggtaaccctgccctttgggcaagtctcaccactccctttgttctagactagaagtcattcatttattcattcactcacttgttttttattcacctgatcaatcacacatcctcttgtctgttcatttatttaacaaatgcttactgagtcatcatccatgccaggctctgttggatgctaggagcagaccatctccattctcttagagcttagagtcgactgggaagagaagaggcagacctgtgcattgcacacttgttattatgattgtgtgtttcactggcgctgcacatagcagttcctgtttgagacatacctcagtgaacaagtacaggacctggttgggtgatcagaatccacatggaatctcctgtgtcatcatgtgccccagcaggtgccatcttttgggaacagggtgtggacaggtacaacacatgcccccaggaactcatcaccacggggattccaagagggctgaggccagccctgcctgtggtcttcagccttctttccaggctccatggtgtcttgtatctctactgggggttgtattctttttgtttgtttcttgtttttaattcaacaaacatttaataattgtaaaattttaatattttgcttctagttgtaaagaagatataattaaagacttggccattagtttcatacattcccaataacggtggttcatataatcatatcttttcctgctttgttttttaactataaaatgaaaggctagttttagaattttattacaaaagaattaaatctttgttgaagaaaattaaagaactgcagatataccctttcaaaggaaataaaaaccacccataattatttaaaagtgactattatttcttttttcacatatttatttttcctttaaaaaagtcagatcatattgtctttatgactttttcatttagcattatattgaagaatctatctttattaaggccttatagatcttcattaaggtttaaagaaggttttttccatggccttaaattggttcacctcctcatttgatgacagtaggattcctcatggatgtagcttgagattctgttttgtggtttgcacttctctcttcttgagagccagttatgttttactcatgacctcaggcaagtaattgacttgtttgcctctttatttatttgtacaggaggaaaataactgcacttctcttggagtggatgggaggggtgaacaagcagaggggcctagtactggtgaaagctgtagcaacagtggccaccgtggagcaggaggggcaggagaggtactaccatttcccatttggtacccagaagccagacactgagggttaagttacctgtcttcagcagctgttgacccaagttggacttgggcagcatacaaatgagagttagcctgagccctgggctggggtgggttggttcattgcaaagatggagctcctccggctccttccctcatcctcacaaaccagaggaagtgtatttggttgaaaatgacccacatccttcaccaggcatgctgccagcagcagcatggggcagctgcaaggctgctgcttgggagttggtgaatggcctggctgccaagagccccctgggccaggggccacccacacccaccctggatattgaggctcagagaggcagtgctatttgcctaagtcaggcagcttgttagtggcagagctgggatttgaacccaaggcttttccactgcatcttccatgttagactcattcaccctgtgagttggaacacccattatgtgcaaggagctccagcgctcccacagggtgctccagacatgaagaagctatggtccttgctgaaatggcacacacataatacaggagatgctgcaagagccaaggatgccctagggacacttatctggttcattccttacgcatacactgtgccaggctgtgtactcagcaccatggacacgaatgtgaacaagcagaccacagagggccagcagacagcaaactgccagcagattgaggggcagagagcactgtggacagcagagggctctgggcagcagttcctgggaagaattgttgtggtgggacttaaggttgggctatcccagccgcagtgctcctgaaaccaggggcacagtcttggcattgaatggtagctatgggaagggcttttgaccaactcacctggatctgaggattctgctacttaacatgctgtgtgaccttgggcacatggcttggcttttctgagctttttccttgtttaaagaggatactattatctgcctcacagagtgggtgtgagaattaaatgagaataaagggacttgaatgtatctccagcagccatgtgattattgtcatcagggggtggcagcaagtgtagagaaggcagggacacgtttggggttgacattgcacattatagagtgaaacataagtggagcccaaatgctatgcttatgtgacacacattgtcctagtaatgatctcatgcacctgctgcacaaataagaaaggaattgtagcctgctgcgcatggctgccccttgagagaggaggagaggagttatttctggaatttgccccaaggtatagcaggtcccttttgacttggtcccacagtgtacacccagtcctgttgggcatttaaggagagcttgctcatcttgaagaaaagtctcctaatgcccagaactgggggatggggattaatggggagatttctggaacctaggcatatttcctgctgctctagttattaaagcagcgcagggcatctgggcggatttgttcagtgatgctggcaggcatccggccccttcccacactccatagtgcagactgcttggggtctaatcctgctgcggtggctttttttcttttctttttccagctttattgaggtaaacttgacaaataaaaactgtgttatttaacgtacataatgtgatgatttgatgtatgtatatactgtgaaaagatgaccacaatcaagctaattaacatatccaacacctcacacagttatctttgtgtgtgtgtgcttgtgtgtatgtgtctgtgtgtgtggtgagaacgtttaagatctactctcttagtcaatttcaagtatacaatatagtgtttagtcacatcgctgtagtgtagatctccaggatttattcatcctgcatgactgaaactttgtactatctgacaaacacctccccatttcctctgtccttcagcccctggtcaccagcattctaccttgtgcttttcccacttctgggtatgtatccaaaggaaatgaaatcaagatctcagagagatctgcactctcacgttcattgcagcattatttacaacagccaagatatggaaacaacctaagtgtttgttgacagatgaatggataaagaaaatgtggtatgtacatataacagaatattatgcaaccttaagaaaggaagggaattctgtcatttgtgtagcatggatgaacctggaggacattatgccaagtgaaatgagccagatgcagaaagacaaatgctgcgtgatgttactcttgtagaatgtagaaaagactgtgacttattaacttgacaggcaataggtcctgctcttgtcagcctcctcatccatagcaggggagcactgtgttatcccgtggacatgtggataacagtagtgccaacctgattgtggtactgtgagggtaaaataatatatgtttaaagagcctgacagagtgcctgtcaccatgagcgctcaagtttttgctcttgggatttggatatctgcctatcctttgctgttccctcctcagggaaactgtcatcctcttctctggccagaccctggttcttcttgggttctcctggggacctgtgtgagatgatgggataagtgcaagggcagtgacaagcagggaggcaggtgggtgacttgggtcaggaatcccatgggtttttttttttttttttgagatggagtctgtctcctgggcaggagtgcaggggtgcaatctcggctcactgcaacctctgcctcctaggcttaagcgctcctcctgcctcagcctcccaagtagctgggattacaggcgccaccatgcccggctaagttttttgtatttttagtagaaatgaggttttaccatgtagcccaggctggtatcaaactcctgacctcaagtgatcctccccaccttggactcccaaagtgctgggattacaggcatgaaccactgtgccaggccctgcagatcttttcctgtctgcctgcagagccctcaggtacctctctgctgattccggcagcctgacccacccatggggcctctcagtgaatctatcttgtcctgagggagaattccaaggctctcagtccctcatggaagggattttagagggtgtgttatccaaatagcctcccaggcagggcttgggctgtttctgcctaatgcttgtatgtgtggaaggcaaggtgctcactgttctggaggcagcctatttcatttggggacagccttggcaacttgggttttgagctgaatctcacttttatcctctagttctccctcatggcgccaaggttctcccccacccctttttttagagatgggtctcgctctgttgcccagtctggagtgcaatggtgtgatcagggctcactgcagcctcaacttcctgggctcaagtgattctcccacctcagcctcccaagcagctgaaactataggtgtgcaccattacacccagcacatttttaatttttttgtagagatgggggtctcaccatgttgcccagactgttctctaactcctgggctccagcaatcctgcctcagcatcccaaagtattagcattacgggcatgagccactgtgcctggctcaccaaggcccttgagcaccttcaggtcccttgagagaggtgacctgccatcccctgcaacttccctccccactctggccctgcagcctcgcttgctccctccggcctttggccctggtcctgcaggtctcattctggattcctcaggggagcttcatcgtggccccaggttcttgggtgactcttgagccctcttaaagttgcagccaaccttggatcttaagtggaatgaaagatgttaaacgcttggtgtgtttttcttttcttgtcatcaggggctgttggtcatgaagagtggagttcaggggcagggggaggtgtttggagtctctcattgaggcctctgtgagctctgtcctggctgtggctgagtggaatgtgtaggtcctgagggttcagagcatgacagctagaagggccttcagaggccattcactcctggttttttttttttttttttttttttgcagaggtctcactctgtcacccaggctgcagtgcagtggtgtgatcacagctcactgcaacctctgcctcccgggctcaagtaattctcccatcttagcctcctgagtagctgggactataggtgcgtgccactgcacttgactaatttttaaatttttcattgagataaggtctcactatgttgcttaggctggtctcaaactcctgggctcaagtcatttctctgcctttttttcttttttttttcatttttgagacggagtctctgtcgctcgggctggagtgcaggggtgcaatcttggctgaccgccacctctgcctcctgggctaaagggatcctcccacctcagccttccaagtagctgggattacaggcgcagcacttccaaagtgctgggattacaggtgtgagccactgggcccagccactcctggggcttttcccctttattggtcatagccccatcagagactctaaagagtatggactctcttaatgtaagaatgtcaaaacataaaaaagttcgcatgtgatttcatagactctctaaaagccatgcacaagcccagagtaagaacttctatttgagtccttctgcattctttatatagatagagaaactgaggtccagagaggcacccacacacctcacagtcattgataggagggcagagggggcctggattggctcagccagaggcagggctgggccatgtgtggatgggagcaggattagcagtggggagatgagcagggaagaggaccagagggacctcagcccggcgagcagtggcctccagccctgcactggaggctgggcccaaacatgaggctgaagtaggatgcggagagttggttagagatgtggaaactgtgcttagtggttcaagagaaagtctgggatagggaggacgtgatctttggccagtgaaggtgccagacccaagtagaacaggtgttggattggaaagactgcatagacacagacatactgttttagaattttacagaggaggaaactgagtcccagcaagtggcaggcagctgggataaggtcagtgcaggtgggtgagttaactcggagtcttttggggtggcaagtgattcacattatttcattttaataacttatttaaatgcacatttgagaaaatatagctggtacacataatttattgctaaggataagtctaagaggaaaaaataagtagatttaaagacagatattaagtaaacagtagtgggggtataaagatatggtaactataggaagttggcatgaaaaccatactgtttaagacctggctggatgaatgactgacaaatttgatctagactgatctctgagcctccaagcatggactcctcttaggagagagtagtacccaaacacacatgtcctctaccaactccctggggtgggcttcttctcaagaatagtgcagagaaagagggagggaccctgtgaaacagttaagttaggagagggtagtacccaaacacacatgtcctttaccaactccctggggtgggcttcttctcaagaatagtgcagagaaagagggagggaccctgtgaaacagttaagttaggagaggcgtcctcctgccgtgtgacttgggtcagcttgttaaaggaggcgagaaggcaggggagggaatatgcctgggcatgtaaggctcatcgggacctcggttaccatttcacctgtgcaaattttcaggactgagtcttttctctatactgccccacgaggggactgacattacttaaggcctctctccaggaccccgagctcaggcctagcccgatggagcagaaccatctctggagcagaaccacccctgaccagaagtccaaagatgtgagactggggtcaaatctaggtttactcctagtcgagaaaatgggaaggacaatgtcatatctcctctggtctgtgaggtcgatggctgtaaaagttgcccagtggtgaactcagttaggtcttatctgttgcagattatgtcactccacccctctgagacttcagttccttatttctaaacatcgaccagcactttgggaggccgaggcgggcggatcacaaggtcaggagatcaagaccatcctggccaacacggggaaactccgtgtgtactaaaaaaaatacaaaaaattagccaggcgtggtggcgggtgcctgtagtcccagctactcgggaggctgaggcaggagaatggcgtgaacccgggaggtggagcttgcagtgagctgagatcgcgccattgcacttcagcctgggtgacagagtgagactccgtctcaaaaaaaaaaaaaaaaaaaaaatggagataataaagccccaatctgtgagattgttttaggattaaattagatagtgtatttaaagtacttgacaatacctggcacatagtaattgcccagtttatttaaggctgttattttaataaggagttttaaaaaaaatgaatacatatagaaatgttgtgattactaatctgtgaaccagtagcaaagctatcacctctgaaccctcaggcaaagcttggaccttacaaatgatgttgccaccttgtggcagcctactcaaattgcaggtttagtgtttttattttaagtcttgtttttaaatttatgattatgattatgataagaaatcagaaaatctaaagttatgtggtttaggcaacaaggtaaccaggaagaacaggctaaaataaaatatctttactggattaaaaacagagtaccagacctagcagagccttaataatcagttaatctatatatttaaaggtatcgcttattaaggtctttttctagggcagacagcttgactagcactttgcatctatcctttgtagtccatcctacttagcaagatcaatattattagtgtcatgtatttcaaaaagggaaactgaggctcagaagtaactgagtaacttgcctgataacacagagctttcatgtggcagagctggaaatgtgaaccaggcaggatgatgattaaacctcctagtaagtaacctctcaaccaaaatatctgtcctgttcctggattctagagggtgtcacgggctgcattcttgatttctgccatagggcctgggattatactctgcagtcctgcccgtgtccttgacagagcacaatagcacccatcatgatttcattggattctactaaaggcaaatatggggtgattattaaattatctgtcccctcctcctcactgctccctgtccccccacaaaggcagttaggtggcctctttggggaaagtaggttttctctgaatggctctcagagaagcaggtttcctgcttgcactttgagaacctgcatctggaaccagcccagaggggtggtagcagggctatgaggaggaaacagaaccagcatgttcctttccaagttggttcagctgacgaggctgtcggagatgaggaccaggtccctgcattgagtggctagagagctgtcctggaaactctttggtccatggtaaggatatccctcatgccaggggaggaagtcttccttgcactagaaaacaacagtcctctttctgtaaagttgggcatctcggcccatttcccttgctggctttgctgggagaggaaggtgtgggttggggtgttcggttcacagtggtaagctttgggacctatgtgggtgttcatgcagggaagtcccagagcccacacatgcatgcttgtgcctccagcctttttccccgctctatgagatatggtctgggagaggcagactagaaagattccttgataatgaatgattgtttagaaatgatggcttattcaggactcccaggggaagagccttcttcctgatttttttctttgcattcatggagacatcaggaagctttgaaaggctgtgtggagagatggcattaggatgtgctcacagacatggggtctcagagtaagcagagtcagatcttagaagatgaggctggagcatcattcccattgtaggtaacaaccctagaaatctagaaccctctcagttccttcccaagtaagaaagcctgtcttaacatccctggaaaatacagtatctattcagctgtgtagctccagggactgaacattctcactggggtatcccattccctttggacatctggcaggatcactgagctggactccactcctctggaactctcttttgtctacaccagcggtctccaacttttttggcaccagggactggtttcatggaagacagtttttccacagatggggttgggggtggggggtggcggatgcagggaagatggtttctgcatgattcaagtgcattacatgtattgtgtactttatttctattattattacattgtaatatgtaatgaaataattatcaactcaccataatgtagaatcagtgggagccctgagcttgttttcctgcaactagatggtcccatctgggggtgatgggagatagtgacacccaaagtgggttgcttatgtccagtctcctccgtaatcttgttttggttgctgtcgctgcagaaaaccctgcttcacagggataggatgttggaaatagaagcaggcttttcagtgctttgtggcagtctccggatattccgccttgattttaatccagaacgtatggagatttgaagttgtcacaaatatatttttaaggccaccagatgcagcttaattggcacttgccactcagcgatagggtttttctttagacaaggtctggctctgtcagccaggctggagtatagtggtgtgatcttggctcactacaacctccacctcccaggctcaagcaatcatcccattttagcctcctgagtagctgggactataggcacgtgccaccatgcctggctaattttttttttttttttttttgagacagagtcttgctctgtcgcccacactggagtgcagtggtgccatctcggctcactgcaacctccgcctctcaggttcaagcgattctgccacctcagcctcctgagtagctgagactataagtgcccaccaccacgtctggctaatttttgtattttctgccacctcagcctcctgagtagctgagactacaggcgcccaccaccatgcctggctaatttttgtattttcagtagagatggggtttcaccatgttggccaggctggtatcaaactcctgacctcaggtgatccacccacctcggcctcccaaagtgctaggattacaggcgtgagccaccatgcctggcataatttttgtatttttttttgtagagatgagatttcactttgttgcccagactgctcttgaactcctgagctcaagcagtctgcccacttcagcctcccaaagtgctgggattacaggcgtgagccaccactcctggccactgatagagttttgatatgagtctgcaagcaattgatgtattatgatctctgtgcagtcagacctctctgctaatgttaatctctatttgcagccactccccagcactagcatcactgcctcagctccacctcagatcagcaggcattagattctaataaggagtgaacaatctagatctcttgcatgtgcagttcacaataggggttgtgctcctatgagaatctaatgccgctgctgatcttacaggaggtggagctcaggcagtaatgcgtgccatggggagcagctgtaaatacagatgaagctttgcttacttgcccaccacttatctcctgttgtgtggcccggttcctaacaggccacggacttgtaccggttcgtggcctgaaggctggggatcctggtctgcactgcataacgtcttatacttttctcacttacaaatgacaatggcaatgtgatatgctgccggagccaggcgtcaggaggcacgttcccactgattcggggagctcatccaggaggggaagtgcttctcctttggtctttccccatggctgagagacaccccctactccccggccatgccctcgtcctctctgggcttcaggtttctcacttatacgttgaatgggggctgtagtgacttcctgttgctgctgtaacaaactaccacacatgtagtgccttaacacagatcttgccgtttcagaggtcagcagccaaacatgggtctcactgggctgaagtgagggtgtggcagggctgcattccttcccaggggctccaggagagaagccattttctggccttttccagcttccagagactgcccacattccttggcttgtggccccttcacttatctccttctctggccctgaccctgaccctgacccttctgcctccctcttaaaaagaccctctgatcacactaggcccacccaggtcatccggggttatctcccatctccgtattctgaaccacatcggcagagtcccttttgccctgtaaggtagtatcttctcaggtttgggagatcaggacgtggacatctgtgggggaccttatgctgcctgctgtggtggtgcactcatcatctccagagccccctcacctctgcagcagccagtcagcctctgtcctccctcagggttgtgggagcccctgccttccttttatatatccttttttaatatttatttttatttttaagacatcatgcctaagcccctgccttcctgccagatctggcctcttcagggggagaagtgcaggagatgaccacttcagtctggaagccttcctctctggctgtcaaattctattcaacttcttaggattcaagtttaaaaaaaggcgagaacactctaattgtttccttcctagaatcatgtgtcttttgccccatagcccctcaaagtataaagacgtacaggacatcatcgcttcctccaaaaagttgaagatccagataggggaagatgtgggtgcccacacaaagtcaagactgtttacttccaggcagttatcagctgtgtcatcctgggcaagtaacttaacctcttaggctcaatttctttacctgttaagtgcaaatagtaggaccttccttttctcccaagggttgtgataagaataaaatcaggaagccgaggcaggaggattgcttgaggctagcctgggcagcatagtgagaccctgtctctaccaaaaaaaaaaaaatctgctgagtgtggtggcacatgcctgtagtcctagctacttgggaggctgaggtgggagaactcttgagcccaggagttcgaggcttcagtgagctatgatcactgcactccagcccggacaacagagcaagaccctgtctcttaaaaaaaaaaaaaggaataaaaattggagaatatattgaaacacaagggttgattggaatagtatgagacaccttgagtgataccgaagccatcataggacttgattaaatgtgacacaaaattattacagggtcagggcttgctgtcgtttatgtgggtggggctactctgcagacgaggacctcaggctttgaaggcccctcatcattatcatctccaaacttcatgttctagaaccttgaaggaattgggtggctggtttgttgagagcagggtgagcgtacaaatggaggctccccgcctgcgtgtggggggccgtgtgcgcatgcaggcggatgctgcacctgcatttctaagtgccggccaccattttccctgcaggcagccactgcctggtcacaccttgggtctaggaatgtgtaacccccactgcacagtcatcctgaggatgatgggcccaggaagagacctgcataggcccctggaagcaggctcagggccatttaggtggggaaattggggtcccaaaggcatctgcagcccaggtaggcaggtttccttacacaagtggactcccagatctgtggggagggaactgctggaggagggccagagtgatgcccctgaagggccaagctgagggcagggccctgattgcccaggtctgaagggctatggagatattctagtcaggtgtgacagcagaggtgggcaggggatggggaactaactgggtatcgtcttggacctgtgaggccagatttaaggcatagagtaacaggagccacctgttaccgtgtcctacataaattatagcaagaggagtattttcttttcctctgccagttttcatgaaagacagagcaagccgtattcctttttccttgttctttctgtttgcctagcaggcagcactccacttgctccgccttacattcagtggtgtgctgggaaatgcataacaactggttctggaggtggggtgaggtgggaggctctgagttgtagcattttcaggtgtccaggaagtaaatatccccaccatggccaatttcatcctgtttaagtgatgtcactgaacgttgtccccaagctttagcattctgctttacattctcattttaatcctcaagcaactctgaattagttgctgttatcccagacttacaggcaggaagcaggctcagagaagtgaaggtttccaacttagacgtgccaggctgtgcacaggtggggacctctgaggggcctgctctgatctgggttggggctgccccaggacccttggaggagccgccaccagagcaatggtaggtgttgggccagaggttgtttaggtggcgttggtggtgaaggctttttctgtgagcttgttgggttgacgattgtgacatgctgccgggagggtgttgggtagacacatggttgtgatgtggcgatggtgggttagggtacggtagtgtgcgtgatgtgctggctgtctcgggatgcggtgtttgtgctggtgatgcagccagtctcctgtcatggtgtgtggcacaatggatttatttggctgaggaggctgcatggtgttgctgtggtgtttgctgttgtattgctttgctagggctactgtaataaagtaccatagactgggtgacttacaccagagaaatggattttctcacaattctgaaggccagaagtctaaaagcaaggggtgggcagtcagcttactttgaggcctctctccttggcttgtagatgggcatctttcccctgtgagttcacgtggtctttggtctgtgtgtgcctgtgtcctgatctcctcttataagggcaccagtcatattaaattagggcctattgtcgtgacctaattttaacttagttacctctttaaagagcctggctccaaatacagtcacattttgaggtagtgggtttagggcttcatcatatgaattttagggcaatgcaactcagcctctaacaattgtgttttctgtaactgctgactgggtggcggtggtggtgattcctcggtggggtttggtgtgacagtgtttgtgaccttgtgaagatatttgtgtgtgtgtttagtatgatggtatcctatgccagtggttgtactgtgaacatacctggtgcttaaggtaaaggcgctggctgtggtggcgttgcaggaggtgtttggggagatggtctttgttgcagatattttctattggggtatgatgcttggtgtttgtgagatattgttctgcccgtgtaccagctctgcccatgcttagagtttttggttaacagtgttggctgggctgatgctttcagtctgtaccttcttggtgtttggggcaaccccacaggctgcagttcaggttgtgaggcaaggactgctgtggtcgtgtcttgtgcagccagatgagagctacatgtctcttactaatccaaacagcctccagaggaaacaaagctgtgcctcctgaagcttgatggaagctgctgcatgaccccggcctcctgccggcctgtctgccatgttttgtgcagctggtgcatgggtgagcctggcagctgaccctcctcagccagtgctgcctacacaggggaagacacctgcggctcctgctctgccccgtgggcaggagtggggcaaggcagcgtctactcttaggtgtgtctcagcctggcccctgcctggctggttgctctgttctagcctggtccctcccaggtccctcctcacaaaaggcagctccaccttcacagacaggggtcaggaggaggacagacagatggaaatcacatatccaaatcagtgtgtagttacgcactgagaatgtgaggaggctaacagacacggtgatgggaggcagagcggccgcgggagggactgagatggggccggcagggtggccatgtgctggaaatggatgtgtgaggtgaagcgcttggaggcgtgggggaggctcagctcccatccctctcagatgggagctgagtgcaaacttcaggagggaactggctgcccagcgtgttggtgactctcatgagaactggggactgtgggcggggctcagcctgccccacctctgctgccaggcaccccactggcatttctctggaatgttggtgctctgtccccagatgcatggcagcctgtacctgccagtcagaaagcaggtgtccagtggtgagcctcagggctccagcctgagccctcctgctttggccactgtagcaccagttaagagagcaaagaaggtacttgtcctgggtccccctttcagctctgacctgaattccctttggggagaggccatggtgacatgggcatcagagccccagcggaaagtccaggggtggcaccttgcagcagccatgaggcagagagcctgtggagtcccctgttcccccctagtgaggggacaccgtcgtagagaagtttacagaatgggtgtcggggcctgagttaaagttagtgttgctgctactgactgtgtgcactgggctccggtttcctcacctgcacagcagggctaaaaatctggcatagccctgggtgctgtgaggttgccatgagatgctacaggtaaggcatatagcatttagcagtgagccgggcatatagcagcggatcagtagaggtctgcggcgctggtaatccttctggcttctggtcccacgatgaccggcctgaccacaataatcacatccgagcattagcggggattgggatgatctctaggactcccagctttgacattcattcatttgttcattcattcatctagcatgcaggccacacctcttaggagtttgtctctatttagggtgccagggctttagggacctgtaatgactaggtccctgccccatgtgtgacctggcagctgggcaggcctgaacctcaccccctctccctcctgcctctggccctatactgacttgcagaactccatttgtagctggatcctcaggccttctcagaagatgacagattctccaggatccactcatgggagtcatggagaccaggctgctgctttgggagttgagagcattttgtctagtggttgggttctatccctactcgcgcttcccaggatctagatgggctcatctgggactcagtggagcagcatgtccccacagccagagagccgggcgagctgcagccacagcaggcaggggaaactggttccacaattccacctagaattgcttcccccttctccctttggtgggctgtgttcattggcagctgagggttgtgtaggggtggagtagggcagctccctactgtggaggcctcctgccagccccacatggctgaactatcacctcctactctgggcgttactgtagaagccataactacagcccagtgggggcagaggcagctgagaatgcacatttttctgtggatctggagagggcagggcatagtggtaataggaggtgatatggagcctaggttcttgtccccactatcatcacggccttgtgtaaccttggacagcttccgtggccctgcaggtcttcaacttctttcccttcacagaggctcagtgattcttgccctgcctgccgcccaggttgcttggaggatgcagtagggtgacgcatgtggccacagggataaaggtcgtgactgagatggtgcaggagctgagatgcgcctttcagcacccatggcagacagaacgaattcagtctccacactcttacccctgagctccaagaggcctcagaatccactgcaaaacaaggcttcaggtagtcctcccaattaattgaagctgacacttgagataaacattttctgagagacctagaaaggcatgctgagtctgcagctaggcatgccttgtggtaggggctttggctagtgatgcccacactcttccctgtcctaggatgggagccaggaagcactcagggatctgagctctggattttctgatcagattctgcctttggatctccttctccaattcaccccctacccccttctctttctccacatgcaacaataaagggagttgtggcattaggtgcactggactgtctaaagaaagtaaatcagattggatagaaataagtccttccattttcctctccctgacctaacaaattcttatgacataaccaagctgtccaaagccagtattgccccctagtggttagcatcaagaatacatagactgcccaaccctcttcccctccacctccttctctgccataccaagataccacctcttttcctctgtcattgttactaactttctcttcatacaagtatgtttctttttgaacccctgtacattctattctaactctaataggtgtcatagaaaaggcagcagagtgtaggtgatgaaagaacattggactgggagtagtaggggctgaaccatagcctcacttctgttgctagcttgcaatgagaccatgggcaaattcctttccctctctgggccttggttttcctatctgcactacaaaaattctgccttatgcagcgtttcccaaaagaggttccaaaggttttttttatttatttatttttattttttcaacttccagcagcaccccaaagctttttaggctggacagttttgcattgtgtaggactgccccaggcactcaggacagtttgcatcccagatctccaagtcaaatcattgtggtaggtggaacacccacatgctccctggcagtaatactgctgtggttggcattcgttgaactaggggatcttgagagcatgtgtaggtggttgctggtttgatgagagttgggtgggtcgttggtgtcagctgcagctaggatgcaatgaagacatctggggccctgggaatgacccacccagaggccaccattgtagtgtaacggaggcactgtggcctcagcagttagccccacattcacatcccctctctgccacttgctagctctggggcttcagacaagtttgagcaggattgtgtatgtggttctcagttgacaatggaaatggccccgtaaccttttcctgttggcagcggacagggagaggctctcctggcttcctgcactctgcacacacatgtgtgtacacacccttgctcttgcccagttcctggtcccgagtccttccccaccctcagcccagctcttccattattgttaatgatcatgtccttgtggggagccctttcagtttgcaagaaggaggttattcccattgtgcaggtgctgggcctgagcctcagaaggtagtgtggtttcccttaagcagcaaggcgaggctagaattcagtctgaatctgttcttcttcttgtttttgctgaggcagttttgtggcttttttcatctacgatttatcaaaagcacttagtatatgccctggctttagagtcattttctcaattttcccaaacacacatagaccgacaaagacccctgctcaccacacatgctctgcccactttacagatgtggaaactttagagggaagtccagaaacacatgccacggttgctgagctctctgtctgcagaacctgttcccttcctccccccaccacccaaactctcctacctccttccaaaagccaccaccccctgggccattggcagcccctgcccggttgtgaggcctggcctgagtggtgctgacaatcaggagtgggagggggcctgcctggctctgagctcaggagtgtgttgggaaattccgccaccctcccacgcaggcagggaagagttaagtggctgccttgtccctcatgggtcccagaggcctcttcactccttttacagactgggtctcctaaggaaactgccgggcagccggcccctcccccagcatcctcacatcttgccttctttggtcctctctccccatgagaaccacaccacccagggcctctagcttcccaagatggggacacttggaagtagagatttaaaaactgtctttgtaacacacacacacacacacacacacacacacacacacacacacagtatccggctgcttgtatccatgtagcagtgcccccctccccccccaccacagacacacacacagagtacccggctgctcatatccatgtagcatcacacacacacacacacacacacacacacacacacacacacagtatccggctgcttgtatccatgtagcagtgccccccttcccccccccacagacacacacacagagtacccggctgcttatatccatgtagcagcatctcacacacacacacacacacacacacacacacacacacacacacacacagagtacccagctgctcacattccatggagcagcaacacacacacacacacacagagtacctggctgctcgtatccatggagcagcatcagctgggtctcagcaggtgctttgtcttggaggggatgacagaagggaggcagcccctgacccaagagtggtgaggaggcctgggttcctggcaaggctttagtctgtctgtctcttacccgccagtctgcaactccgtgatgggagaagaggtctgtgagcttccctgacttagcctagccctccagtggccagagagactccagaggcagggagaggaggctccaagcagaagcggggctcttgggctccctgggttggggaccttcaggactgtctcatggagagtacctgcatccctgccatcccaccaggtagtggccacacagtcctcatgacctcccacagctgcttgcggctgccattgggcagctctgatggtcacaagggcttccttagaataaatgagctgcagtctcagctcccaccatagcctgggcttggcgtcgtgggccctcatagagcaaggctcacccctcctgcaagtcacagcccttcacgccccttcctgcccaagctcccctaccagcaccccaggccacaggatctgtcactgcttggctgtggctgggtgaccacagataaaacctggcactcatggcctcagtttcattgtttgaaaaaaggaaagttttatggagtgtgtgtagtcataaaaccatcctcttttttccaggattccagaaaaagagattatccagaaagttttagaaatatctcacaggggagatgacccatgcctagcatctgtgtttgagagggagtttcgtcacagaccagtgtctagggagccctagaaagctgttactcccaataaggcctagtttttgaatgtcacaaaaactagactcctcagaaggaggagactccttgagacaaagtccagactcctcgggacaccaaaggcccatcgtgatctgaccccagccagactctgaatctgagtgcagcccatggaaaggagtcctgaattttgagtctggtctctgctacagcctggctgcactgtctcagattgccaggcctctctggctttgtcttcccactgataagatggggatgaggcttgttagagttcagtggggtgagtgcatacaccatgcctggcacgatctcagtgctgctcagtaacaaatacaatgggcactttgcgtctgggggaggggctgcctcttctgccctcaaggccaagttttgaaacccccatcttcacaaagtgttgctggaccacttcaggcaccactgcaacatccatgccttcaggaggtttttattgaacatctactgtatagcacacactaaggatacaacagtgaaaagaccagcaggccactgcatccctggagctctctagagagagagaaacaaggagacaaatcagataaaaagcaacatgctctgggaagtccagggagggaggaaataatgggagtcagctggagggggcaacagggaagcctgttccaggagtgacttttgagactacctggcaaaaaagagaatttgaaaaggtctggaggggttccaagaggaggccacaggtgtgctggggaggaagatgtgagaggcctccggaggtggcaaggttagggcatgcctgtgccttcccacgacactgtgtgctggggttgcccaggatgtatccgggatgcagggagaggcttagtgctccatgattgagaaaggagtagatggagccccttcccagccccttcccctggccttggtctgcacaagatctctcctgtttgctggtgtcattttcatttcctaataccctctggctggcagcaagtgattgactgtgtcctcagcccaagatgctgaaaggaggtctgagtgaaagggctttccacctaggggagtgtaaggagagaaagctgggatgaattcctaggcccacaggtacaaagcctgtttctgctgcagggtctgggagctgggagacagacgggagcagagccgtgtgtgattggagcatcgaaaacccacacacccagagcacaggctccagcgcaggatgagcagccagagccccgtgtgaccacctggccccaggcctggccggttcagattctcatccttactggtcaccagctctcagtgtgtgacccacgttggctctcctgaccttgaattgggtgcaggatttcaaatcaagccttaactaatgtttagtgggcacagtcccagtctgggaggaagatgtccagctctccactgtctcagcattgaacctgagacagggtccctctccctctccaggcctcggattccccatgtgtacagtgagaggtttgaactaaaggtctctaaggcccttgttgatttgatgatctgttattcctgttgttctagttttgcaggtccttggcagtggaggggtagttgtgtgtcagcggttagataatgtgaagcatagttaatctcaaaaagttattgataattttaaacattaggcacattaatagaaagctggggcctagaactagagaggagatggttctgtcaccaaagtagccaaacagatatgctctcagagaaaacagaatcaaaagcaggatgactgtaaagcaggtgttcttccacatgggtggaggcagtagaggtgtgcagctcagaggaaacaggccacctgcaaacattggcacgggagaggcgtggcactggtaagtggaggtcagaaggggaagttctggctcgagctaagaaggggctttccggcagggcgcggtggctcatgcctgtaatcccagcactttgggaggccaaggcgggggaatcgcctgaggtcaggagtttgagaccagcctggccaacatggtgaaacccccatctctactaaaaatacagaaattagccaggcatggtagtgggcacctgtcatcccagctacttgggaggctgaggcagaagaatcacttgaacccgggaggtggaggttgcagtgagccgagattgtgccactgcactccagcctgagtgacagagcgagacttcatctcaaaaaaaaaaaaaaaagaagcagctttctgaatgaaagatggcatgagctggcctgccttgggcagtagggagcttcctgtcatgggagatatgagagggcaggtgcatggtcacctgacaggttggctgtcctttgtcctgccgttctgcatagctgccattctgtgacctgggatcaggtccaggcttgccaaatgactttgggtcagtcacttagcctccccatgcctcagtttcctcctgtgaaaaggagagagaattcctgtctgcctctcagtcttcttgtccagatcagttgaggtgctggctatggagtcctttgtgtgaacaccactgaagcacgcaagggatgtttcttgtttttccctctaagttgtctgcttgccatcatgctgccgtttgagtggccagcaaggtgggggaaactcttacagctcaagctgacctgatctgctgagctaaatttctgctttacggaatttagtcttgggagcaacagaatgatgggggtaaattctaaagcaggaaaacaaaacttggcactagtgctgagggatgtcctggccaaggcagacatcgctaatcaatcaccacactctttcctgctgatcttggatatatggtctcataacctttacccatacaatgacagctactaataaccctgacaggacttggcctgtgaggtaaactctatttgccattccttagtaaagaaaaacaatcattaatgccattcctggtcagtaccaagcaagtgactcagtaaatgcattaaggggaatatgtgcattggtgggaagtgggggttgggacagctgtgagctaaattaatttagatggggatggcttcttggtggaggtcgtagtgggctaagcccaagaagaagagaggggagattaagagaagaaaagggaagtaagaagggcacactgagccattagcctggcataagcaaaggctcgagttgtgggctgggagaaggctcctgatcagcttggggttgggtggccctggcttgggagtcggatccctgtcactcatttactgtgtgaccttgggtgtggccattcctcttgtataagatataaagaaactcttaaaaattttttttcttcaaagatgaatatctgcaacatacacatatacaaccttccttctccccaagcagtgggttcctaatgaatgccttgttggtggcagcatattaaagtgagatccaaatgactcagaaatctgggggctggaagcagtagctacaccaggattgttatcggggaagaaggaaggatgtgggccgagtgggcctggacggctgacagatccccagatttctagagaatggagtattttccctgaggtcagcagaaggtttgggcccagagcagctgagctggatatctgggcctctgtaccatttcaaggagcccttttattttcagccaagagggaggggaggctgggtaggggcaggggttgctgaagggttctcatctattaatagctgggatttggggtcacgaggccccgggtgctgggatggcctgatgcctggccttgccagccaatcacagggccgctgctctagggtcctgcacattagcaggttccctattgtgaacccacagggctggcctgggctctggccagatgttcaacattccctcctgacccccagtgggcctctgaggggctgccaagtgtccactgggacagaggtagggagcaggaaggaagaagggaaaaaagggcttgtgtgaatgcagccagtgggtccaagcttgcaaagtagataggaatgcagggtgcttatggtagaggttcctgaagtgggcagtggaactcctgggtcctggtattgatgtcacactggaatgagagataaagagagagagagagagagattgttggcccactcaggccttcttcacccctgggccacatttgttcccctcctgccatactcaacaccccagaggccaattagttaatttcctctaagatgtgcagccatcaatggaatgatagaactccatttgccattttgccctgttgggagctcagaatgggctgcacagtttttcataaagagagtagcatatcagagtaaaggggatcaagtgaccttaatgatgactacataggacctgagagacaatttatggactgaagtcatgaccttgggggattcttttgacctttttgggtccttagttcctcatctgtgaaatggagaaaacaccagcctcacagggatgttttgagtaccagataagcgagtgtgtgaaagacagagtccacaccgtccagtcagatgggggagaccccaggccagtgcccaggagattataatccaaggagaaggaatggagagaaactcagtgtggtaggagagccccaggctgggaggaagatacctggattctggttcagctctctgctgtctcaccaccgcacttgagacagggtccctctccctctccgggtttcaaattccccctctttacattgagaggttcaagatgagtgtcgctaaggcccttattgatttgatggtctgttattcctgttgttcttgttttgcagatcctgggcagaggagaggtagttgtgtgtgaggcattatataaacaggagcatggcaataaccatctttatacccctttatacccctttataaccacgtttatacccatggcagtaaccatgtttatacccttcacccgtctctgcacacacatgtgtgcaggcatgcgtgtacatacatgcctgccccagcctaggcaagatgggcatgggagaccccctgacttgcctgcctgtggctgaccgcactgttcccctgcttgtaggcacctcacactcagtgtgttcaaagtggaggtctttattgcatcaccccaaccccagccctatttcccttctttcttctacttgggttgctatagtcctcagtcagggagcccaccctaatttatccttcttccttgctgcacatagctgggagtcactgagtcttgccagtcctacccttgaatatagatcacaaataggtccaatccctccttcccttcattttacttcctcccactcagaggccacgctctcacaacggcctgtgaagcagccacctcatggggcttcctgctgccatgtttggctgcatctctgtatgtcagccagagtgcaaatctatcatgtcactgttgtgtaggaagccccccagtggccccctggtcttggggcagaggccacccttaccatggcctagaagtcttttcgggatctggccctgcatacctcaccctcgtccctcccaggtgtcctgagcctcactccagccaactgagtttctttttttttttttttttttttttctgaggtggagtctcgctctgtcgcccaggctggagtgcagtggcgcaatctcggctcactgcaagatccacctcctgggttcacaccgttctcccacctcagcctcccgagtagctgggactacaggcgcccgccaccacgcccggctaattttttgtatttttagtagagacggggtttcaccgtgttagccaggatggtctcgatctcctgaccttgtcatccgcctgccttggcctcccaaagtgctgggattacaggcgtgagccaccgcgcccggtccagccaactgagtttctctcagttccttcttgggtcctaatctcctgggcactggcctgaggtctcccccatctgactggatggtagggactctctttatcactgctgtctctccagcacaagataggtgcctggtgcaggttagcagttcaggaaagaggaatctgtttatatactctctcagggtgaccttgacccttaattacaaggggttctctatactaacagagttcgggagatctggagagaaccctcacccagggtgacagaaaccctggatcccaggcaggcctcttcccatgtggccagcccctcctgggcctcagtctccagtccacacaacaagagattggaccagatgccctcttttaagggcccttctggttgtaaaggtgggataggaaagaggctagcagcatggcctttgcagccaggcagacccaggttagaatcttgcttttgtctctcattggccgggtgatcttgggcctctgtgaaccttggtttttgtcatctgtaaagagggatgcttcttgcagaactgggagaatcaaatgagagagcctagtgcctgacacttagcaagcacacaataaaaggcaccaccctcctttccagtttacaatctgttggtggaacttggcagtttgaacgtctcataaatctttatcattaagattcttttttcccctttaccttttggtgccaggtaattatagagagcctgctgtgcgcttggccttggcctctactctgcctctcctgagagcccagtccccgttcttcatgcacaaagacaaagaccctctgttttggttcctgacggtgccacccaagtggttcaggtgtgtctggagcctgctgtaggttagcgttgtgactgtcagaggctggtggcactccaacctaggttgacactaaatgaggccagagaatagaatggtttgctgagcctccccaacaactatgaggtaagctgcccaagggtccaggacaaggcttggctcagagtgaaggcaagctgagggctgaacccctgacactcattcttttttttttttttttctttttttgagacagggtctcactctgttgcccaggctagagtacagtggtgtgattgctcactgtagcctcgacctcccgggctcaagggatattcctgcctctgcccccatccccagtagctgggattacaggcatgtgctacaatgccaggcagatttttgttttgttttgtttttgagatggagtcttgctctgttgcccaggctggagtccagtggctcgatctccgctcactgcaaccttctcctcctgggttcaagcaattctcctgcctcagcctcctgagtagctgggattacaggtgtgcatcatcacccccagctaatttttgtatattttttagtagagacagtgtttcatcacgttggccaggctggtcttgaactcctgacctcaggtgatctgcctcctttggcctcccaaagtgctgggattacaggcatgagccaccgcacccagccagatttttgtattttttatagagacagagttttgttttgccatgttgcccaggctggtctcaaacttctaagctcaagtgagcctcctgtctcggcctcccgaagtgctgggattacaggcatgagccactgtgcccagcctcgtgacacttatttttgatgggaagattccccaggggcaggagccaagatccagaggcaggcgtgtgtgcagataccttcccagaaactcttgtcacagggtgggctgtctaacccccactggacatgagctgctgatggagaaactgaaagttgagaagatcaaggggaggaatatctttggtagtagaaaagacagacttcagagggttcgagtggagatcagcaaacagcaggaaatgtgggtaaaatgagtaagtgaattaataatagtcttctccttccaacagaagtagaatcctctcccaggcctcagaagtagaatattaatgcacttggtgcctgctgcatttctttcctctagcatcagaatgtgagcgtttgactcttagggctgttttggctgtgttacagaaagccgattcaaagtcacccccgcaaaaagaagttgattggttcccttaactgaaaatgtggggttcaggtttagttagatccaggagctccatctctcaactctgctttcctctgtgagagctccatttccacacaggctctttccagccaatgggagaaacggcctcagggtttcccatggatcagcttagcaaccacagcaagagagcatttcttttccagtagcatcagccagtatcctaaggcaaactcttattgtctggattgggggcacatattcagtcctgagccaatcatgatggctggaaaagatggccctctggttgcccaggactaggtcatgggcccacccctgggcaagagtgtgtatgtgagcttagcttcactgacccacgagagctgggccaggaggcattgctgtctggaaagatgatggaaaggataaaaaccccttgtgcccactgaacctctccacttttatattaaacaccaaattggctccaggttgggattttaaaatgtgattagtaacaaattacctaccataccttttgccggtgtctattgtcacacagaggtgacctgctgatgtaaaattagctgagaacatctgctgatacaatttggtagtcacaaaagtaaggttgtggggccagctcttaagcagtgtgtctgctgagcagtttcttggatgtagggaaagatgggtgctgctgtgatcacattctatctgcagggacactataatctaccagtgagatctgcagggaggttgacacatgtagggacatggactgggctatgagcaccctgtcggccaatcataactaaatgtagaaataactcaagtttggatagaagattttgtctgtacaatggaagggttaggtttggtcacctaccatctgcaatcaattggtaatgactgtcaaaactggatcccttccttacaccttatacaaaaattaattcaagatggattaaagacttaaatgttagacctaaaagcataaaaatcctagaagaaaacctaggcaataccattcaggacataggcatgggcaaggacttcatgactaaaacaccaaaagcaatggcaacaaaagccaaaattgacaaatggaatctaattgaactaaagagcttctgcacagcaaaagaaactaccatcagagtgaacaggcaacctacagaatgggagaaaatttttacaatctacccatctgacaaagggctaatatccagcatctacaaagaacttaaataaatttacaataaaaaatcaaacaaccccatcaacaagtgggcgaagtatatgaacagacacttctcaaaagaagacatttatgcagccaaaagacacatgaaaaaatgctcatcataactggccatcagagaaatgcaaatcaaaaccagaatgagatactgtctcacaccagttagaatggcgatcattaaaaagtcaggaaacaacaggtgctggagaggatgtggagaaataggaacacttttacactgttggtgggactgtaaactagtttaaccgttgtggaagacagtgtggcgattccttaaggatctagaactagaaataacatttgacccagccatcccattactggatatatgcccaaaggattataaatcatgctgctataaagacacatgcacatgtatgtttattgcggcactattcacaatagcatagacttggaaccaacccacatgtccgtcaataatagactggattaagaaaatgtggcacatatacaccatggaatactatgcagccataaaaaaggatgagttcatgtcctttgtagggacatggatgaagctggaaaccatcattctgagcaaactatcgcaaggacagaaaaccaaacactgcatgttctcactcataggtgggaattgaacaatgagaacacttggacacagggtggggaacatcacaccctggggcctgttgtggggtgggaggagtggggagggataacattaggagatacacctaatgtagatgacgagttaatggggggtgcagcacaccaacatggcacatgtatacatatgtaacaaacctgcatgttgtgcacatgtaccctagaaagaacttaagtataataattaaaaaattctgggttggatagtccaaagttgtgctccggcttagcaggaaagaggcctgtgatcgcctagtaatgtctgccatgggcagatattaggacattgaaagcagtagtgtgtttgtcagtgtagtagccattcctttacttttttcagctctcttactttagacatgaatcaactgaacaaatgagggcaaccttagggctcaaaagaaagacaaatgcaagatgggggcttgcctgggaagtgatctgaaaatgcagacttatgtacacaggttgtgtccttgcggaagtcattttccttgctgaagctcactttcctcatctgcaaagtaggacaaatgatccagtactgtgaaccaagcagagttcctaggaggatcagatgaaataataaatgtgaaatcattttgtcatacttacaatagcagaagccattaaatgacactttttgtgtgttaggcactgttctgagtgctttgtttatatcctcatttaatcctcaaaacaattctatgaagtagttcctattgttatcctcatcttacagaaaacgacacttgaacacaaatgtcaagtcacacgcccaagatcacacagctgcagtagtgcaggcagcctggctctggtctcactgttacgaatcccttcttgatggtacttctcactgtagactgtaaagtgccatgcacctgaaagggattccctgaagctgcacttctagatcctttcttgttcaggaactgccttattaacccagtccctcatgaaaatggaggtgaaattggcctgctgtggtctgtatgtcagtctttcagggcttgatgacacttttccaagaccttgtgggaggtaaggaaggagaagcaatgtagacctaaggatctgtccttgatttccagtcaaactgcctgggtttgtttcccgcctctaccacttctagctgggtgaccttgggcaagttgcctaacctctctgaaccttagtttccttgtctataaatagagatgataatcctgcctactgtgtaggattattgtggggaataagtgggataacttaagggatatgcttggtaatgtactaaatactcagtatgagggagtggtggtggtgatgatagtgcagaggtcaaaaggaccagaatgataggcacaggctgcccttcccaggaccagaatcttttggcagcatcatttatgatgatgccctggtcagttctgagcacattctcccctcctagctgtgtggaagcctggtggcttcccctacagaacatcaggctcacttaatctccctggggtgtgcctccgctctcacccctgcacaccctccctgtgcagacaggtctgcagtcatcggcttgagctgctctccctgtccagactgctgtagccccaaaccagcccaatccagagtgagctggtcagtagcctgcacttcctggaggcctttgaggcttaaaatattataatactaggagcacaattgagagagattctgattctaggctgaggcatctgggagtgtacaagtgcccttgtttggggacctgatgaaattagcaaataaatgaatgacaacactcattgattatttgctttcctgtcactcagtgcatttccttctgttgggtgggtcccagtgactccagctgtgagatgggaccgggcaatccactctggagtgtgtgaaacatgcagattcctgggcctcaggaatctggacagtggacagtaatggttactttgttacttgggagcttggttaaaatgtaggttcctgggtccctgccagagatggattcaggatctctggggtagggcccaggaccctgcattttcacaagcttccctgggagattctgcagcaggtggtaagagaaccaaactgggtctcttcttaagagtattctttggaccaggtgtggtggttcactcctgtaatcccagcactttgggaggccaaggcgggcggatcacttgaggtcaggagttcaagaccagcctggccaacatcatgaaaccctgtctctactaaaaatataaaaatttttacaggtgcatgcctgtaatcccagctactcaggaggctgagacacgagaattgtctggggcggggggcggggtgggggcagaggttacagtgagctgagatcccactactacattccagcctgggtgacagagagagactccatctcaaaaaaaaaaaaaaatttctattaaaaaaactgattctattaggtttctccttgtcttccctctgtaagaaacctcactcccaactcttggggcagccaagagaccgtgcaagactgagtgctcattggatgaatgagcacccagagctcctgcttgagtttctagagataagtctctgcttcttcatgagctccccatccctgcaggtgtgcaaggagctccagagcatacccactccagattggggctgggggatccaacctatgggaagagtgtgtgtgatgttgtgatcttatggtctggagaggctggtctttcatagcaaatgtcaatttctgcagaatgggtagtacagaatattggtgctgagagggaatttttttgctgtaggactccttgtcttccctctgcaaatagtcttgcacaaaagctccttgagtaaaggagacagtcagtcgagctgctctgattggcctggtgtccagcagtacccttccctacctttaacaacttctgacagattaagataatgagggcagtatctcagtgccttgcagttttccgtttaaatataaaaggatttgtctataaaagtttcatttattcaacaaacactggatgaatgagcacttgctgggcctagggaaccccaggatacaagttctaagtccttggccttgggttccctatggggaaatgatgctgagccatgggaggggtgtcagtgggacaaagggtgtcccccaggcaaggcttgaaagggcagggtgttgaagagaacagagtggcctgggagggaaggtggggagcgggtggagtggtggaaaggggaacacggtgttcagaggtgctgagatgggactggtcaggatgtttggaatcaagggtgggaagagcaggacatgaggctgtaaaatgggaattggcaaacagagcttgcatcgatagtccctcgggagccagcagggctcctccagtgtcccaggggagacttcggaattttctagtcagcatggagcatggcagaaattttcctccttggggcctctgagatgtggggtgctactccctcattcttcacagcagctccccagaggcaagaagggccatagaaaggccaagaccttttccaagagtgaatcatctccacttttgggagtggtgggacagggttggggatgagaggattggaatggaattggagctcagattcttgatttcatttaaggaatgtgattttagagatgtcggcactaggacgctgggattctaattctggccggcggcactacttttgcttctcttttaaatctttttgtgcctgagttttcccatctgcaaagtgggatcatattcatttctaccttgaggattattttgacgcttaaagaatgtgctgatgaaggataagagcctgaataggatgcagccttgttccgtagttgtattcattcattcattcattcattcattcattcagtcagtctgcatgcttgggtgcttaagacccctttgcagtttgcactgctggcctcggtataaatccccacaaagaggaaatgactgacttcattttgacattcttccttgtatggaaaaaatgcaacttctacccactggagtctcgtgtctgtcctggggatcccacaaaagaagtttgtgccacttctgcttgaagaccttcagagatgtgtggattaaatgatagtagccacagccttgtggccacataccctcagctgcttcatccaggcggaggagaggtgggcctggtttctgggtgaggtagagagtgtgttctccatcatctgggcctccctgtggttccctgccttccccaccctggggtggctggtctggtggactttccctcacacagtctgtgggggcagctgctgttgcttgctccttcctttttgccttcctgagaagtgggtggaggccatggggcagctcttcttggtcaaaggagtgatttctgcttactgggaggagcacctgactcataggagatgttctcctgcaggaagggagaggtgattctatcatcaagtcccaggagaaaaacagaaggaagttggttccccagagcatcctctgtcttctggaaaatcccagtgtgctgtttaaaagaaggcccttatactgcctcccttggcactcatgcagcaaatgtttgtggggaggtgcatcacaccccagtttccccatgccttcagacacatctccagcagcctctgccttctggaatccagtgcagaaccctgaggcagccaaaaccatcatcataaagatcaggcactgttgtaccccaaaccattctccttcagaccccagtgccacttgtctcaggtacagccttacgcttggaaagctgtctgaccagtccactgccgatcagaaacaggacccaagcagaggggaatggaacttcttgaagacagcagacttgtaggaggaagatgtgtaagctgagaccctaaaaaccaacgaggagaaaacagagggagagacgctcagacggaccagcctggcagagacaagcagctctgaagatcccagttctctgggtgcagcactgtgtcggggcaaaggaccccagggatgtgtgtgttactattattccagggtcagcaagctacgtatggtcctgtgcgccaaatccaatcagctgccggtttttgtaaagttttattggaacctagccatgcccgtttatttatgtgttgtctgtggctgcttttgcaccacagagttgagaagtcatagcagaaatctatcttatggctcgaaagtctaaaatatttactagttggctctttacagaagaagttgccaactcccaatgatttgagctatcaagaaagggttaaaattcagcttctgttagagaaagactgggaggtgtgaatctcttggggaaggccttccaagcagaccagctgatgatgttgtcaccccatgtgttggtgcttttaatgaatggtaagatttcagattgtctggatttcataaaattagcaagtgttaaggccaagacaaatgttagacagtgtctaatttaactcttgaatatccacatgagaggaaactgaggcccatgtaggcaagggggctggcttgggagcctatggcagcagagctcactctcagagaacccaggccaaagcactttgttctgatttgctgttgattgcacacacacatgcatacgctcatgtatgtgagcgtgcacacacacacacacacacacacacacacattcaagcaaaattccctaagcagtaaaatggcaaagatgtgtttgcctctaaagggcagttgcttattttgtcttttctgtgcctgttgcctttgaggcaggagaagggtgggcaaggattcctgctttgccctatataaggaggctgttgtcccagccaggcccatcccctggcaacaggactaaaatggtaacagggagttctgtttaaggccagctctgcacagcagctgcctctcagcccgctgctgatgaagcgttgtctgcccaacacctgcccttcctcctgtaaccagattggaatgcaggcaccagggtcttcctagctctccactggggtctgcagtcatggggtgggtcctgtgagggggccattgccccactgatgtgtgcccttagtgccaccctgccttgggtccaaggccatggggacacacgagacatcttgacgtcaacgggtcagctagattctccataagagacttcccactctgggcctcagtttccttccctgtatagtagaattagagccagctgtggctaaggctccctttcactctgctgttctataattctggcacctatgcctcccttgcagcagctctgaaatgaaaaggtttttgttcttattctagcatagaaattacatgtcatagcttagggcgtcagatttcctgagttccaatctctggacaactacctacttagttgggtgtctctaagggaagttagcaaacctccctgcgcctcaagtttcctcacctgtaaaatggagataaaaaggggacctatctcatgaggtacctgcagctattgtagttaaagcataaggtggggcattggactaagtggctgtcaaggtctttttccacctggggctctgttgttctaaatcccagacgtctagtctcaagctggagaattacctaagagaggacatttcacagctctggaaacctgatctggagattagaggcctggaaaaggcaactgaggagaaaggagcagtggggagtttccagggcaccaaatgcaaatctgagtacaggtgtggatgccatgtctctgccagccagctcctcagggcagaggacgcaggagggcggcagcttctgagcgggatgaggtcacagcatcttgaggcctgggatactgtcacctcagccccattcatctgcagttttttgcagaaccatccttcccatgtctgctgtttggggatgatggtgggggcagggggggatgattatctttttttttcacagtataacagtgattaagtaccctgttttggagtcagacttcccttaacccagctggggaacctcattaggcctcctcagtttcctcctctgtaaattgggaataataccagtcatgaggattgagtgacatgatgcatgtcaagagctcagcccattttcccacataagagaaggctcactaaaatctgaagagtgcctactgtgtgccgaggtgcagcaggaagcatggagaggcttccgttctggtgggggtcgaccagtaacacacatctggacagaactaacaaggccatttcagacagtgatgtagatcatgaagaaaataagacacagccatgcgatggagagtgtgacggagtagggagggtggtggccacttcagagtgagcagtcggtggagtagggggggcctgttggaggaggtgacatttgatctaaacatcagaaagtaaccagccatgcaaaaatggcttgtggatagacactggggcagtgaccagctattgagctccaatgtaaaggatgtcaggatggctgtggcatggtcagtgaggcagaaagtggcagaagaggatgctggcagggtaggcaagggccttataagccacaggtgtttggatttcattctgagtgcaataggagcgtctttggagaattttgagcagtgggtgggtaacatagtcctgatttacatcttttaaagataattttggctactgtgggagagaccaacttggggtggggtgagcaagtgtgggagtgggaggccagctgggcatctgctggaagtctagtaagagatgattgtatgcaccagtatggtggcagcagagagagagagatgagaatggtattttggagagagtgcagacaagactggctgatggatggcatgtgagggcgagggaagagaggaatacttaaattttgctcctcagcagctgggtgaagggtttgccatttactgacctaggagagactgaaggagaaactggtttgggtggaaatagaattccatttggatctaaggaggagatgctgataaaccactcaggtggagatatcaaggaggaaggatttgaaagggctcctttgcaggcatagccgaggacagagttaatgcatggaaggacacggtttgttttgctccgagacagcctgtgtgcatttctaactgcagcttatccctcttccagccctaagcttctggattagcttgaagggcctccctccctcgcccaacagcttggagtgacccacatccctccttgaaccctggacgggctcaaggctgcccaaaatgctcctctgcaggactcctattggcgcataggtggagcttccagccctggtgtgtctgggatcagagcctgggataacctagaccagccagccttaaagaacattgacagtgtgccaggcactgtgttacaatgctttaaacctcacgtttaaggggtctgtgaacttggatggaaaaaaattacatctttgttttcatgaatctctagctgaaatttagcatttcctttatgaatgtaggggacaaaaaaaagtattagtggtaacggtgactttgttgtcaatggaaatcacagatatttgtatatcacagttgttcaagatatctacaaatatttaggctcattgctatttccaaattataagtaattattaggcatgccactagctcttgttatttgttaataaggaaacactaccataacagattctttttttattattttgtaaatatattttgatagtattggttttctttataattctacatttcatttggtgcatttaaaaatgtttcggctgggcgcggtggctcacacctgtaatcccaacaccttgggaggccgaggcgggtgaatcacttgaggtgaggagttcgagaccagcctggccaacatggtgaaaccttgtctctactaaaaatataaaaattagctgggtgtggtggcgtgtgcctgtaatcccagctattagggaggctgaggcaggagaattgcttgaatctgggaggcagaggttgcagtgagccgagattgcaccattgcacccagcctgggcgacagagcaaaactccatccccaccccccgccaaaaaacaattcatttatttttttattttatgcattcataaatgttgtgagaagtttataggcttcatcagatctcagagggacccatggctcaaaaaaggttaaggacccttactttacaagtatgatcttatcattcccattttacagataaaagagctaaggcccagagaggttgagtgtcttggccagggccacacagctggttaagggaccaagcccaaattaatgcacatctttctcattccaaagtcagcgttcagaacagtccaccattgcctccaaagtagccccatcagctaaacctacaactgatttgaatagagtccgcaccacaaaaaaatcatattttgtctgaaaaaattaatccagcatttgcatttctagtctctaacacgcccttgtttttttgttttgtttagttctgtttttataatacaagaatgttcccctttccagttaaatgacttgactttattatggcaaatcttgggggtaaaatggagttctgaaaagaggcaccatgcctcctgtgtatgcctctgagtatgtcttgccactccaggtatgtgatcagagatagagaagcatggcctcagcttagttgattcccgtgctgcctgtgagcagccagtccactgagcaaacgagaaggctgaggcctagggccatggggtggcctgattataatcacatagctccagccaatggagttctagttcacgttcttcccctgttgcaaccttggtatggctcagatgaccagcagactttggtccaattccgactacccctaacttagctgagtgattttgagcacattgcttaccatccctgggactcagtttcctcatctgtagagtggactggacagtctgtctacctgcctttatgtggttgttggacagtataaacaagatgtccataatgtgcttggcacaaaagagaggctcagcaaagggcagtgattcttatgggccaaatattaccaagctctcagaggtccctagcccccaagcaggggctgggtgctgaggaaggcagagacctccttgctgcctgagaggtgagataggacatttgctaagctcccaccaagagccaagtgtgacctggtggtccaaactcagccacagtggagacctcactagatggactgtgaagggtggagaatgggggacagattcctcacctctcatccctgtctgtctgtcccttcctcagaatcccagaacaagaagtggtggctttatttcacacacctctatatttaataagcaggaccatgacgaggtttggtgacctcagggcccaaatggactgtctgctggcataagtggtgcttgagtcatttcccagggatgagcactgggcaggcttccaggagctgaatttaccctctgattctctgctctcctcttctcctccccacccctaagctccattttagagtttccagcttctttggcttcaggaggcatggaccaagatagaaagtaaaatagttattcattcaccagggctctcatgcccttccctgagcaaaggcttaggctcgattgaagggagaccctggaagcccgagacactgaaccaggccctgaggctcctgctgatatgtatgtgcactggggacacaggctcagtgacctaaatgcccagagagagactggaggaaggagaagctggggcattcagggcaggctccatcagggaggtggcatatgaatgggcttttttgtttgtttgtttgcttgttgttgtttttttttttttttttttttgagacgaagtcttgctcttgtcacccaggctggagtgcagtggcacaatctcagctcactgcaacctccgcctcccgggttcaagtgattatcctgcctcagcctcctgaatagctgggactacaggtgtacgccaccacacctggctaatttttgcattttttaaaatagagatggttttgccatgttggccaggttggtctcgaactcctgacctcaggtaattcacccatctcggcctcccaaagtgctgggattacaggtgtgagccattgcgcttggctggaattgggttttgaggaatgagttgcagcatgtatatgataaaaataaaaaccttcaaagagtaaagaaggacataaaatagaaagtaaatattctctgacctctcccatgcctaaccaactccttattcctatttcctccaactcctactattcttgtgtgtccttcttgcaataatctatggatatatgaagtgtacctatctatgcatcataaaaaaagtgtaaacaggatcatgtaacgttaacatccccttccacctaacagcccatcttggcagtcttcccatagcagtgcacgaggggagggatggcttttgaccagtggtgcgaaaacattggtggtcattgcaggtcgctagaaagatatcaccaagaactcagagatgagaaaaactacagtgcgtatggggagctttgataggagtgaggcaggcagtattgccaagcaattacgagcctggtctttggatttggaagatctggggttgaatcccagtttcagcactctctagctgtgtgaccctgggcaaatttcttcacttcaatttccccatgtcttaaatggctaacaatacctccctttgggactgttaggcacttttggtgagagcacttacaactcacagaggcacctggtaaacagcctccgctgtttttgctgctgttgtcatgtgacagatggggcagggggagctgagtcccaacaggtggggccaggtgcatgttgggtgtttcaggagtgacatttggagagaagagggccaaccgattgatctgaagctcaaaatagcctggaagtgcaagaacaacaataaataaatgggttctggatgcttttaaatcttggcatttcctgatctcagctcagctggtccagacagcttcatcagcatttactgctgaggcggcggcacacgcctcccttggccatgacccaaagctgctttcaagaaaatcagatctagaaacgtttggatctctggtgccaggcctatgggtcatggacatatggcgtggatcaggtagtgtcagggtttgtcccatgtgtatggggaatgaagacctaggggatgaggagagagagagcaggaccttgtaggacgagtgggtgatatgggcacaagggaatggccaggctcctaatcccctctccaagtgtttattgagcacttactatgtgccaggtgccagggatacagtagtgagcattaataaaatactcatgcatataaatgtttaataataaatgcttaatttcccagtgtgctcagctccagaagcctctgtaccttcagaaggccatgagagcgtgcagaaaggctccttatatgatctgcaagctcaaaaaaaagtttcctccaggaagtagagtgaaggatgaataggagataagtaggcaaagcctttatgtgtgggaagcgtgttccgggagagggaacagcatgcgcagaggctatgtcaggggacagatcctgtcaagtgccaggggtggaaagaagccagcaggactcagagtggcagtagggagtgggtgctggtgtgaaatgatgtgggacagggaggcaggagacacaccgtgcaggaccttacaggccacagaaagagtttcagtctttacctgggaggaatcagagggagccagtggggtcaggtctgtgtcttgagaagatagctgtggctgctctgtgtctagccgcctggtgggggctggagtagaggcaggaggctatggctgccattgacgtgtgagttggtggtgtgaactgggtctgtctcagagcatgaagggttaactcagtgactgggtgtgaggaagctacaggaaggcccagcaacccagagaggctgcagctgtagttgcttaaggactcttgtgtagtaatctcactgatggccattgtcttttgagtatctactttgcactagacactatgtgaagcccttctcgttaatcctcataagaaccctaagcaggtgggtgtaccctattttactgagacccggagaagttaaatcatttggccaagattacacagctcagcaccgccccgtccctgacccccgagctcctctggttgacggtcctctggataagtgttctccagttcactttgacccttctcaggacttggcccaaggccccagcttctgtctggttgctccagtgaccctcagtgtagtgtctgccctgacctcaggaaccagttcagagctggtctggaagagcattgtcctacacggtctgaaaggacacagccatgtggccctcgctcctccgtccctcctggcttgctggcttctggcagcactcaatttgcgacgtgagctgaaccggttgtgtctctgggctttgcatgttgcctgcctcccgggattcagatggtctctgctgcttgtttttatttttcttcttgacttcctctcctctcctcctttccctctgctcccaccctgtccccatctgttgtggccccatgggggtcttttcctcccctcccagatgtgcaggcaggatttgggatggaggcagaagcctccttccttctggcttctcgagaaggaaggaagctaacagtttggacagctgttacctgccgggctctgggctaggcttttggcatacgtgatcacacagagccctcatgacacttctgtgaggcatacacagctttatctctacagatggggcagctggggctgggaggactcaggtgttgcatccatggtcacatgataaggatctgactcgatttaaaatttttggcttcccaaacttaaatgtgcctatgaatcacctgagtattttgttaaaatgcagattctgattcaggaggtctgggatgagtgtgaagggctgcggtatttaataagctccaggagaggctgatgctgctagttcatggaccacaacatgagtagcatagggaggagccagcagagctcccacttgccacttaagggattctcccacttgagggttcaccagccctcaatccacaccacctccaccccctccactgtctttcctcctttttaggaattgctgatggggcacctgacacttttccaccctgcccacgtgctgaccctgcatgtctcagggccctggttgtctgctctctgaggttgaccagtgctggaatatgggggactgaggctcagagaagtagagggacttgtcccaaatctcatactattagcacagaggattcaggttgtgactccccatccagtgttctctactattgcttccactaggactcagaggtcttgagattctagtcctggtcctgtctttgacttgctctgtgactttaggcagctcactttccctctctgaacctcagctttcctgtttgaaaaatggcttaacctctgccctgttgtgagtgtcaaatgggagaatatctaatttacagcataaaggatttttatgagccctgagacccaccagtcctagtagagtgggagaaacctagtagggcaggaaagtgggttctcgtggtacttacatgtgcgtatggcaggggcttcatttgacaaaacacctccttgttctgtcattgagagagttcctcgcctcctgcctgtttctcttagtcctgggtggcaatcaagcatctgattttccccctttcctagttcaggtgcctgttattctgtcattagcacacagtaaggaggcccaggggtggggagcctgctgcagtgccacccccaccccaggacacatccctattacttgagaagaagggagtgtggaaacgtgtgattcagttgacacagattcattgtactcgcccagttcttcgctctggaacgcacttctacataaggcaggctcagctgtggcttaggaggccagccagagcctcgagtctgcaggacctgagcgagtggtggtctgctcagcaggcctccttggcttcccttggcctctggccctcactgaccacatgaccaaggagagcctgctggggccaaagagaacctctttcccaccagctttatctgggagcctgtgggtctgcgtttctcatcatctgacccactggaaaaggaaaggcaggagtttccataagggaataaatggatgcggaaggaaaccacccctcaacccccggtaaaggggggttagtgtgagagagactgcagccttcacgatagtgtgaggcagagatgccaaaactgtcctgggaaatagtgcctctgcgcctccaccccacaccctcccgtcctgcaaaggtttagtaagcacctactcagtgcttggcacctttccaggtgctgggactcagcaaaggacaaggccaggtgcttggacagtttatattctggagaggagacggatggtccctggttccatgctatgcttaaaacacagtgatgcggccgggtgcggtggctcacacctataatcccagcactttgcgaggctgaggtgggtagatcacttgaggtcaggagcttgaaaccagcctggccaacatggcgaaaccccatctctaccaaaaatacaaaaattagccaggtggtggagcatgcctgtagtcccagctactcgggacgctgaagcaggagaatcgcttgaacccaggagacagattgcagtgaggtgagctcacaccgctgcactccagctggggcgacagagtgagacgctgtctcaaaaaaacaaaaacaaaaacccacagtgatgtaatccccgtgagtggaaggattggagtgttggggaaggcctctctcactgcgactgaacagtgggaaggtggccccaggacctgggggaggtgtcccaggtggacagccccagacagagggttgtgttccatgggaaggaagaaggccaccatgcctactgtatagggagggtgggagagtccaggaggtggtgagaaagcaggcaggctccagctgcactcggcccctgaggactccgggttttagtcaagggcaatgagaagtcaggggagggttttcagcaggagagtgagcgatgagccctggtatccgctctgcctccagctcgctgggcatggtgggcaagccctgcccctcttgatgggagcttcctccttcgtgatgttgcctgggcttctggaacccaggaagactctcaaaggtactaacaggtgtggagaactttcccctccccattctttcaaagtcacatagataacatggggaatgcccactttgctggattctcacaggctgctcagacaccctgagtggtaaataccatggacttggggagtggtttcttagtctggggtttgggtcaaattaactatcatagggtccttaaatagcctacaaagtagtgtatatggaaaataggtacgtgtatatgagtttatgcaaatagagaattc

SEQ ID NO: 106 - DNA, 179777 bp, Homo sapiens
gaattctaggatggggttctgcttgggcaaagccctgggagcttggcagagaatttcttttggccttctttttctatctaggaaatggggacgatagtagcatatgctttgaaggcttttagtgaagaatagttgaggcaatgtctgtaaagtgttcagaaatgctcaatgagtagtaacccttgttattatgaaaaggggacacatgtaatgcagaccctgccatttgtcttccctctgagctccaggtccttgatctagtcgaggccctgaggttcttcttgcagagtgttttttcctctctacttgtggggcaggtgacgagggatcccatccagccttagcaagtgttgcaatactgacttaggaaaccacttctagtgagatgccacttgaagagagaagaaatacccaatagtggttaagagctctaggctttggagttttaactgcctatggtttaaatcagtgctctaccacttactagctatgtgaccttgagcaagtatcttaacttctctgacctcagtttcttcatatattatcccccaaattggggataataatagtatgctctttgtaggataacttaagatagctgcagataattaaggcttgcagcttcacctgacatatagtaagcgctcaataaatggtggtcactaggatgatgacaacgacaatgatgtaaaaatataaaacacacaaatgtcaatttgagctttctgggagttgggagtgccttagagacgatcttgcttaatgcccttaccttgaaggaaggaaacagactagaaacagatcagaggatgccttcaggtcactcagcagaggcaagacagggccctcggctgctgtctgcttggccgggctggctctgagtagctgggactcaactgtctgggacccactgtctgggaactcagccgggtgagccctgcttggctgagagatggatgctccccgacagctctgcagccgtattttttccctgtgattgcctggcagaacatagtcatttagcagagggaatgcgaggagatgttagaaaccaaccaggccctgagcagttgcagcagccggcccacgagtcgctccctgatgttgccatggcaaacagccttggcaacgtggctgctcgcgcctttatttctggtctcaggctctttgcaaggaagtgtggtacccagaacactggggagggccctgccctggatccttggcactgagggcaacccggcctttatgctgctagcagtcccaggccacagcagcccctgctcaaaacacctgcagacccaccctgcctttgcagaagcagactactgggtatgggatttgaagcctcaaatgtccatgtagctcactatccatctatttgtcaaatactgtgtttggcaatgccatactgttcccaccactgcaagagcacagccccaaaatattcttttttttttttttttcgtgagacagagtcttaccctgttgcccaggctggagtgcagtggcgcgatctcagctcactgcaaccccctcctcccatgttcaagtgattctcctgcctcagcctcccgagtagctgggattacaggcgtctgccaccatgcctggctaatttttttgtatttttagtagagatggggtttcaccatgttggctaggctggtcttgaactcctgacctcaggtaattcaaacctctcggcctcccaaagtgctgggattacaagcgtgagccaccacgcctggcatagccacataatattcttaacatgaaccctggtgttaaaggttcccaggcaggtgtcatcttcaaccatgtccttcaaggatggtgatgatgatgatgatggtggtggtggtgataacagtcaacaactgctatatccccttcaagagatcaggccctgtgccacatccttcacatgtgtaatcacatttaatctcagaggaaccccatgaggcagtcccactgctatccccattttacagttgggtagacctaggccaacccagagtttgtggtgctggtgctgttctgcagctcctcccctataccaggcaaccatgggggccccgccatgaagtgtctgtcccctccctgtgcccctctcccatctgcacctgcacactgcaaggctcagctcaagtgatgcctcctgtagttccccctctcagaactggccctttttgctctgcgatccccacagtctgctacagacactttctgttccctgccttccctcaatactctgccactctggtgagtttatttctgccctccagccatcccaaaacaaaacagaagggcagactggctaaggaggagagctctgactgtgctgaggagtttggacttggcaggcagtggggagttggcaaagagttttattattattattcataacagtaataatataaaagagccaacacttagagacttattggtatgtgccaggtactaagctagggccattaggtgctttaccttgtttaatcaactaccggtgaggttggcagtatggcaaatgagaaaacagacttggagaatttcagtgacttccccaaatcacctagctaggaagtaggctgggatttgaacctaggtttgtctgacttcagagcacatggtcctaacaattgcagtggtggctaatttggctaagcacatagaaggactggaatggtgtaacaggaggcatctttggtgtggctggggtgggtggtggggcccataccctgcctcagctgtggggctcagtggaaatcactagatataggtaagagggcagggggctcagagtggtgccctcatagccaagatgggggtgcagaagaggatttatatggggagaacatccatttattcagggcccactgtgtgccaggtctgttccttactctggccttccctggagcctggttaaatgtaaactgtagcctcagccctttataacctttgtttatgtgtttattcttttttttttttttttttgagacagattctcgctctgtcgcccaggctggagtgcagtggtgtgatctcggctcactgcaacctctgcctcctgggttcaactgattctcctgcctcagcctcctgagtagctgggattacagacgcccaccaccacgcctggctaatttttgtatttttagtggagatgggatttctccatattggccaggctggtctcgaactcgtgacctcaggtgattgcctgctttggcctcccaaagtgctgagattccaggcgtgagccaccgtgcccggccctatttattctttactattccctcttctctacccagttgggactggagctcatcaagctggttttccatcaaatcccagtgacttaacagtccctggcacactgtaggcccccaataaatagttgttggatgactgaatgatgaacaaatgctgttcgatctttcacaacatttgcctgatgtttgcctggcccagaggtccttctttgtgcctggagacgtgctaggatgtgtgggtgaggtgagtgtggcagcattgtaccagtccccacaaggagtcacctgcccttgtcaccaagataagtcttgcacacgaaggatcaaaggcaaacactttgtggagcctccagaacccactatcagaatacacctccagtgcacagatctttgtggaatgataaaccactgctaggaatccagtctgttccagggcatggctctgcctcaactggggaggggctcagagttttgagagtcttggtatctgcagggaggtgtctggtcagatgtccccacatcttcccgggggattgaaaccagcactttacactaggcctcatgcctatgacccacccacttactccagagagactaggcaggctgcctgcactcatgaggaaggaagagaaatccagggaggtgaaggggcaagagaggacttggggaccagtgaccacagtgcccagcccaagaaaatgaacttcaggctgcgtggatcttcccttgcttagaatctcctcatatgttgcacctggcacctttcctgcctagggccaattcactcttagtttgcacatggttcttacaagcttggcagtcatgtcaagcaaggcctcatgatatgagaagcagcacattggttctgttagtgtgtgcctatgtaggcatggggtgagaggtgaggatctaccagaggcagacacgtggactgcagcaccgaagccagcttggggccaattagtgagggggctgaggggtcctgcacacctgtcttgttcctgaatacattactatgtgaaagcgcaaagctcattggtgaagacagtgtatcgtgtctgaggaaaggtacattctgttcagtgttctccgagaaagcaagaaagtgtgaagtacattttggtattaccatcaaaaataggaagtctatcaaaagcaggcaaaagttttggcattccaagttatttataaagtttgcatattgttagcatacataattccttgatgaagccagatgaatgagttagtctagccataaagctttctttgaaagttaatgcaatctctgaaaataaggtgttgtcttttatgtttccaaggctgcttaaggtagcacaaagagtttgtagctcggcattagataagtgctgattggcctcaagaaacagtggcacttgcgcttagtgattcataagagcttgggctttagagtctggttcaaattttagctttgtgacttttttttttttttttttgagacagggtcttgctctgttgcccaagctggtgcgatcaaggaggctcactgcagtctcgacctcttgggctcaagggatcctcctacctcagcttccccagtagctaggactaaaggcatgtgccactacacctggataattttttactttttttagagatagggtcttgctatattgcccgggctggtctcgaactcctaggctcaagcgatcctattgcctcggcctcccaaagtgctaggattacaggcaggagccactgtgcctggccagctttgtgactttttagttgtgtgatctaaggagttagatagctgctctgtgctctagttagccagctcccaaatgggaatgataataggacttacctgccaggcttggtagaactaatcagtggttctcagccatgagtgcacatcagaatcaactctgtagtttaaaaaagtcataattacacatctggggctgtcccagacctatagagtgagaatctttgagagtaggcccttaagcttctctgtctttaaaaagctccctctgatgacacccctgctttggtactaaaaatcaggtactattcatagagtgtctgtcatgaactctgccagttccctcccctctctctttcctgcctcagtgtggggtacaggctagcatttaggatgaatgaccagggaacagatcgaaagcctctttataataatgcccgtggagagcagggcaacttctttatcaggcatttccatttgatcttcacatcaatctcatgtcatagggaaaagaagtattcccattttacagatgggaaaatagaggtctagagagtgacttggtaggatcctgccggtaatcagttttcaaatattcgtcttggtccctgtgtttgtcctccttgatcctcaatcccacacccacttatgggtcagctcataggaggtggggggattaggattactttatgagtgaatgggttggaagagaggaggaagaaggcagcctgagagaacacaagtcacctgcagactcccagaggccagtgacagtttgatgtatcaggccccttaaagatcagaggggtgctggtcatggtcccagaccatgcagtagcttagaggtagcaacaggactagaatccatttctgatgcctgattcactgccatcccagctctgtgtgctgcttccacagtgtggtcagggtgtggctccactgataatagaattagtcttctagctagtgtagtgaggcctttgcacttgctgttccctctgccggcaacgctcttcccaggcattgccatggcttgctgcttcctcacctccttcctgtcctgtcaggtgtcatctcctcaaatgaccaccattctactttctgtctctatgattttggttgtgacatggtttctcatacaagtgggatcacagtatttgtctttttgtggctggcctattttacttagcatagtgtcatcaaggctcatctctattggggcaaatgtcaggatttccttcctttttcaggtagaataatatttcactgaatatgccacattttgcttatccattcatttgttagtgaatacctgggttgctttcacattttagctattgtgaatgatggtgctatgaacatgggtgcacaaatatctcttggagaccctgacttcaacccatttgggtatatgcccagaggtggaattgctggattatatggtagttctattgttaatgttttgaggaaccaccatactgttttccatggtggctgtaccatttaacattcctaccaacagtgcacaagggtcccaatttctccatatcctctctaacacttcctgttttctgtttgtttctttaaatagtagccatcctaatggatgtgaggtggttatcttattgtagttttgatttgcatttccctaatgactgagcattttttaatgtgtttactggccatttgcatatcttctttagataaatgtcttttcaagtcatttgcctgtattttaaaattgggttgtttgttttttgttgttgttgacatttagttctctttacatttgagatactaatctcatcagatatgatttgcaaatattttctcccattctatgtgttgcctttttattctgttgatagtgtcttctaattcacaaaattaaataattttcacgtagtctaatttgtctattttttcttttgttgcctctgcttttggtgtcatatctaagaaatcattttcaaacccaatgtcaggaagcctttgcctgctttgtttttttctaagagttttagagtttgagctctttcatttttatctttgatccatttggagttaatgtttatatatggtgtaaggtaagagtccaacttcattccttcgcataactgaatgtgtcttgaatgagtgagtagttggctaagtccttaagctgtacaggctgccgagctcacctaaccctcctaacagtgtcaggagaaaaatacttttagcaccattcttcacgtgagcctgatgctcagagggtgagtgtggggcttggggacatagctcctttgctgaccaagccacacagaggtccccagggcccagcaggcaggcatgaccagggccccgccccaaaatatcatgccccagtgccctagtggcctcatgccactttctccttggggttgggcaacagctcctccctgccctgtgggtgtggacaccaggtacctgcccagcagcgcctggggcctccagcctactccagcactgctctttgtcccagtggctgaaggagtggcagcctggcttgtactttctggtccagccccaacaggaatgtggcaatctcctcccactgtgcctgcatccacacctccctggtggggtgggggtggaccatgggcaggcaccatagcaggcaaaactagaggacagtgatggtgtcttgggtggaagctgctttgccagaggcccatctcctgagaggctagagcaggcccaggttggtgaatcaggttccagggagagcagggtggggttgaggagtgggtgaggagccaagcaggagagggaggtggaggtttagaatccaccctaagaggagaagaaagccctcctttgctcagctggcctgccagaagattttcaatgatatggttgtgaaacaaccagaggaggggcagtaccagccggttccaggtgatgagcacagcccagggtctgagggcaagtgggaggcacacgagaacagtgaagaacagagctctgagtcagcctgagtccagggtctgtcagttagctgctgacttagggcatggtacttattctgcctgggccttagtttcctcacctgtgaaatggggtgaagagatatagatatagatatagatatagatatagatatatctatatatatatatctcagtgggtagttgagttgagaagatgagaaggtacaatgtctgaagagcttagtgcagtgtgtctgggtgttatgatcaataataatgacaattaccagtgaccagatggtttggtgacagtttagtggaggaagccgtgcagcagtcactccttgtgcacgggaaaccagttgcagatttgagcaagccttgctccctgccctggatgaacagatctgctgatggccatggaaggtgcccagggcagagtgtcaagacaacttttgcagcagaaagggtattgaaggatgagcaggagctggccaacatgatgggaggggcctcctagccagggaccaggctgtcgtgatggctagcatatcatgtggctgatgactgagcaatgagtggctaggtgagaggcttgaggggaggctctgagctgactggaggactccccatgggggtgaggaacagacagcatgaacgaaatgtctggaagaatccaaagatggaacaccaagattctcgtccgagaaactagctggaggctgctctgcagaaggggaaaggccttggggaggtttcagaaggagagtgactttgagggtgactagttcttccctgggcctcacaggcagcatgggatgaatggtatcaccctgtggactgcaccgctcctccccaggccctaggagtgagtgggggacatgcagggatttgtgttaaggattgacacaaaggctggggtacagcttctcatatgtagtcctgactcaagtccctggctcaatacagcaggaatcggtggggccaggcaccacagaaccactaggtacagccctcaataaatttaatgatgcagatgatacttagtgccatcataatgattattactcctatttaccgttatacctgttagtgtgtcactgcgaaattcacacagcattttcacatccacagttcacatccttgtgaggattttcatttctgttttgctgatgaagaacccaaggcccagggatgtgaagtgacttacccgctgaggtcactgttgtaggaactggacgggaatgtgagacttgtggcccttcagatctgcctggttgagaagagagatgttttttgaatggagcccctccgctactgctgtctgagttccctgccttatcttgaattctttttggagcaatgatctccagtcttttcggaattgccacatctcgccattgtatgattttgcaacagttgcaactgtgaaacgcccccagaaaactgtaatctccattgatctctatgtaatttagagttagggaagaggaaaatcttgttttttgcatctgtgctggaaagaagagtgtcatggtgagaatattgtacctggagtctggagggagccctgggctgttcctctttgctgtgtgaccttggacaggtctcgccccctctctggccctgagtttcctaatctctgccatcctgtgactcattatctttctaaacgtgagctgttttaaagtgtcacaagtctgggattgtgaatcatgggggctgttttgctttggtaaattctgcttggagctgaaccaccaggtactggatagagagggagactagttcctggagacagatggacagatggagctaggaaacagtctcatcgcagatggttaatgtactttccctgcacccagtgggtaatgtcagtgtaggttcttaactccccaggttatggcccctttcctggtgacaggtgcaatgctgacttctctttgaactgtaagttggaagaaatttgtcatgggatcatgtgccttaaacgagtgggtttggaaggaggagaaggtggaggaggaactccaggcaagagaatccctgatttccaacctccccagtgaatcacggaacattggataagtcattcatgggggtggaaagattgggtgagaattgggaacttcaggccagattttttttttttaaaggagcaagtcattcaaaatcctctactgacagatgatatctacaataatttcttccccttttccacagcattattttatccaccttgaatcattttttaaaatctataaaacaaactttcttttagctgtcttctctgttttagttaaaatatatatatatatatatatatatatatatatatatgttaataggggaaggaaggtgtcagtgaatactcagataccccaggggtctgcagacttggctgtgggtgctctttgaggttcagaatggccattcttgggccccagcccctggtgtctttcacacagagctgcttacagagccgctgctggctcaaccatgaggtctgtaattatttaaagaaagctcacatcaagtggaaaaagagtgaaccacatttaacgtaccatgtggccaatgggcaattcaataccaaagccatccgattatctctggcccgcaccagctgctggattttgcagccgggtgcattaggtgaccatgggactgaccggcaggtccaagtacgcacgatgggtgcccgtgcaggcagcctggccaggcttcagcctggaagacaggatctgtgtacatccatagctgtgctctgagctttacagaaaaagttaatgtaaaagcaattttgaagagtaaaaaagaagctaataattatgaaattcaaaacttaaatgttttactataacacagacagttgtttaattgcactgtaatttatcgttaataccaaagtattttggagaaataatcttagattccttttacttttatattttggttgttttgtttagcaaatgtaatatggattttttgaaaattaatatttaaaaattttcagtattagggactaatttgtcagagaaagtaaggttatccccaccctgccacttagcagtttagcggttttaaatgcctttcaactgaatatgggattatctctttttatttatttatttacttttttaccttttctatggtgctgatcttctatgattatataaattgtattttttcttgttgcaaaaatgatatgcattaatttattgaaatgtgagagcatacaaataggtaagagaaagtaaagaaaactaatcccggccgggcacgctggctcatgcctgtaatcccagcactttgggaggccaaggcgggcggatcacctgaggtcaggagttcaagaccagcctggccaacatggtgaaaccccgtctctactaaaaatacaaaaattaaccaggtgtggtggcacacgcctgtaatcccagctacttgggaggctgaggcaggagaattgcctgaacctgggaggtggaggttgcagtgagccaggattgcaccactgcactccagcctgggcgacagaggaagactctgtccaaaagaaaaaaaaaaaaagaaaagaaaactaatcccagcacccagaaataaccagtcataggcagtgcttaagaaaataaaggtaacattgtaggtttcacttctccccaagcttctctccttgggcacacttttctcacctctcagcctccttttatgggcggattcctacctgtgaccttgagatggggagaacatagacggtagtcatagtttaactatctcctcctttataaaatgggaacagcaatccctgcattgctgtgagaatgcatgtataatggatctgaaagcaaattgccaattgtagagtcataaacagatgtaaggctatgttgctacttccctgtgcatgtgcctaccacagctgctgatattgctgcctgttttaactcagataataccaggtttagacaatatctgatcacctccaagtacttcccaggctttaatcactcccgaggtttggcttttagtctacatactatgtaccgcatctctctacatgtccgttaatatgtacagaacaagataaatacccttgctggtggggaaggcatttaaactcagccttcctgatttagaatctattactcagtcgggctgtttgaagtgttaactgatccaccttgtgattcagactgcagtcggagcagaaccaaggggaagagattggtggggctcacgcagagcaagccccaggaagacccagctgcctggcaagctcattttcctactagtttcagcatacactgtggttcaatgtgaaagagacaatgaacttgcttttgtatttattttgcaaatgtaacacagaccctggtttaaaagattatgttacaggccaggcgtggcggctcacgcctgtaatcccagcactttgggaggccgaggtgggtggatcacctgaagtcaggagttcaagaccagcctggctaacatggtgaaaccctgtctccactaaaaatacaaaaattagccaggcgtggtggcaggtgcctgtaatcccagctacttgggtggctgaggcaggagaatcgcttgaacccgggagacggaggttgcagtgagccaagatcgtaccattgcactccagcctgggtgacagagtgagactccatcttgatcacttgaagtcaggagtcaagatgaaaacataaacaaacaaacaaaaacattatgcatgttacaaatggcagtcatcccttgcactcacattcttgtgtttccatccccagagcaaccctctactaatttctaatgtgttcttccagaggtaaaccatacaaacatcgcatatatgtggtctaacttgctgcctcctgggtttttattttttgttttttgcacaaatggtagcaaactaagggcattgttgtgcaactttttttctacttagtatttcttaaagatcatttcgtatcaatatgtagagatctgcttcactgtttggattgatcatagtttgtttaactagttgggcatttaagtgattgctatttattttattttatttcgttgagacagagtctcgctctgttgcccaggctggagtgcagtggcgtgatctcggctcacagcaacctctgcctcccgggttcaagcgattctcctgcctcagcctcctgagtagctgtgattacaggcatgtgccaccacacccagctaattttttatatttttggtagaggcagggtttcaccatgttggccatgctggtctcaaactcctgacctcaagtgatcctcccacctcggcctcccaaaatgctgggattactaaaggcatgagccactgtgcctggcctatttatttatttatttttagttaaaaaaattttttttaacctacctcttacacagaaataggttatttctaattgactactgctgctagtttgcagtaagttttgcacacatgtgaccgtatgcataggataaatgcctcagaggggaattgctcagttaaaaggtgttgtgtatttatttatttagttagattttttctgagacggagtcttgctttgtcgcccaggttggagtgcagtggtgtgatctcggctcactccaacctttgcctccccacaacaagcaattctcctgcctcagcctcctgagtagctgggattacaggtgcctgccaccacgcccagataatttttgtatttttagtagagacgggattttgccatgttggccaggctggtctcgaactcctgacctcaggtgatccgcctacctcggcctcccaaagtgctgggattacaggcgtgagccaccgcacctggccggtgtgcatatttaacattttgatgtatattgtcacattcctgtccgtgaaattatatcagtttatgtttctgtagaaatgcataagaagtgtttgtttcttcacaccttcacccacacagcatgttattagacttcgttgatctttgccaatctggagtctctgaagttttaattcatagtccttttcggatggttaagactcacctgtgttgcctttcctgtgaactcgtatcagttgtcgattttcttctttctgattcgtgtgttgagcttgttttattcctattccctcacgtggccccgggtccttcttgcgtgcccccctcccctggcagctccgtttggaggaggatgcctcctgggctagggtcagggtccagacctgactgcctaccctctgggtgagcttgactaagtcagttaaactctctgagtcactgttttctgctctgtgaagagaggatattagttcaacagcagggatgttggatagatagataatcagtataaaagtgtttttaaaactgtagaaagctgtcacaatataatatcacattagtatttacttggtttcaaatgagtggtaagattttacttaccttaaactttacagccaagtcatctggttaaacaggtaggcagagtgaggcccagaggagaatgggcctgtcggagtcaggtgtcagaggctgggctgacaggtaaccaggtcctgatttgtcttgctatatatagtaggagccatgtggcaacctgcagtttcttccagagcatcctgattttttttttttttttttttttttttagacagagtcttgctctgtcacccaggctggagtgcagtggtgtgatctcagctcactgcaacctctgcctcccgggttcaagcaactctcctacctcagcctccagagtaactgggactacaggcacgcgccaccatgcctgaccaatttttgtatatatatatgtaaacacacacactatatatatacacacatatacactacatatatatatacccacacatatacactacatatacatatacatatacatatatatatatatatatataatttttttttcttttagtaaaggaagggtttcattatgttgggcaggctggtctcaaactcctaacctcaagtgatctgtccaccttggcctcccaaagtgctgggattacaggcgtgacccactgtgcctggcctagaacatcctgatttttttaaaaaagtttttttttaagagacagagctttactttgttgcccaggatggagtgcagtggtgcaaacagctcactgcaggcttgaacccctgggctcaatcattcctcccacctttgcctctggtgtagctgggattacaggcatgcaccatcacacctgtctttggttttttaagtgccaactctttcatgggtgaacccctaagagccaatacttcagagctgaaagatgtctatgttggaatctcagttctgctagctgttagatgtaaaccctggactgtggacttagcctttttgggccacggttgcagaagatggctgaaacagtgcgggagtccttcttgtctgctgtagatgttgttgttgttattattattattattgttattattattattattattattattattattgctttttttttttgagatggaattttgttcttgttgcccaggctggagtacaatggcgcgatcttggctcactgcaacctctgcctccagggttcaagcgattctcttgcctcagcctcccaagtagctgggattataggtgtccgccaccatgcccagctaatttttgtatttttagtagagatggggtttcaccatgttgggcaggctggttttgaactcctgacttcaggtaatccacccgccttggccccccaaagtgctgggattacaggggtgagccgccgtgcccggcctatggtgtcattgttgctgcttggctttgcaggaggcacagcggcagcagtcagggttcaagaccttgctctgccctcgtttgctggttgtttgaccttgggcatgtgacttcacccctctgaggtaatgtaggagtcccatctatacagggtggatttgaagtatcagtgggctttttatatagagtacttaccacataggaggcacttaataaatatgctatttaaaaattcttgacagggtgtggaggctcacacctgtaatgccagcactttgagaggccgggacgggtggatcacttgaggacaggagtttgagaccagcctggccaacatgatgaaactccatcttacaaaaattagccaggtgtggtggcaggcacctgtaatcccagctacttgggaggctgaggcaggagaatcacttgaacccaggaggcagaggttgtggtgagccaagattgcggcactgcactctagcctgggcaacagggcaagactccatctcaaaaagaaaaacaaaaaacaaaaaaccaaaacaacaagcaaacaaacaaaattcatactaaagtgcctgttatgtcctggcactggtccagatgttggggctttagcagaatggaagcagcatccctggcctcggggaccagcgtcaggtctaaatgtcaattctgttgtcccctcctagaagctgtgggacacagagcttccctaaggagatttgagggtttttcctgcctctgtagactctgcagatcactttcagtgagattctttttttgagtaaccctaggaaaattgactctgcttgtccctcgtcccccaacaaggggtagggccttacctgactggccctcgagcagaggtgatctgaggttccttgactaggggtgtggtatgtgtcttgttcactgtccacctgagatgggatctggttctggacccctaggactggatctccttggcttattaattgttctgccaagggaagtttccttctcatccaacccctgttcagtaaccactgtgcttggacctggggatacagcggtgagccccacctcagcatcatccttcaggagctcacacagagaggcggaaaatacacaagaggatttcagctagtgataagcccttcgaagacaataaaacaagggcatgtcatgggggtaggtgggttatgctagaaagtgcggtccagacgcctctctgcaatggtattcatgctgaagctggagaatcagaaaggaagcaaccttctggggaaaagtattccaggcagtgagaaaagccaagagcagaggcatcgagtggctaagcttgtcattcgtcataaagtacacaaacgatttgtgaaaatgggatccaacgggaactacataaagaaacctggtgtgtttgagcattttttttttttcagagcaggtgatatgctagttataaatcagtgcacgccctgcctgaggggatggccaagtcagcctgggtgaggtgagtggataagtgcatttgaggccatcgcttgagctacagtatttatttgaaatgagtaaaatctacaaggcctcgataagtggcagaaccgaggccttcctgaattcagagtagccctgccagcctgtcctgacggatgagggcttcctcgttggctctccagctaatagtgtcagcgtctgcagccaccatcgacacaaagtcaatttccactcttggatctgcgatttaacacccagctgctcagagagctgcagagagtggaggtcagtggggctaactgggttgcttaatgaaagagggaggtttccagaattggaaaggcggggcccctggcagggtcatggtgcagagaaactagcgtggctagctcatggggctaagctgggaggaggaaaggggccactgtcacagggctggagcccacagacccacatggaggccttggactcccatggaccccattcccctgggaggcatttcttgtagctctaggagtttgagttctagaaaaaggccaggtgggcagcttggggcattctttggcttggattaatctctcctagtaacagcgtgagtaatggctaccttttctccctcttgcccttattccataacccctgcccacctccaaacccacacagagcgctgtctgtggttagcaccagctggaactggggatgggtctgaccatgtgagggcacagctcatggtggtaaggctaaattaaaggtcacttggccaactcgttggtgtactctgtctgctgggtaaccctgccctttgggcaagtctcaccactccctttgttctagactagaagtcattcatttattcattcactcacttgttttttattcacctgatcaatcacacatcctcttgtctgttcatttatttaacaaatgcttactgagtcatcatccatgccaggctctgttggatgctaggagcagaccatctccattctcttagagcttagagtcgactgggaagagaagaggcagacctgtgcattgcacacttgttattatgattgtgtgtttcactggcgctgcacatagcagttcctgtttgagacatacctcagtgaacaagtacaggacctggttgggtgatcagaatccacatggaatctcctgtgtcatcatgtgccccagcaggtgccatcttttgggaacagggtgtggacaggtacaacacatgcccccaggaactcatcaccacggggattccaagagggctgaggccagccctgcctgtggtcttcagccttctttccaggctccatggtgtcttgtatctctactgggggttgtattctttttgtttgtttcttgtttttaattcaacaaacatttaataattgtaaaattttaatattttgcttctagttgtaaagaagatataattaaagacttggccattagtttcatacattcccaataacggtggttcatataatcatatcttttcctgctttgttttttaactataaaatgaaaggctagttttagaattttattacaaaagaattaaatctttgttgaagaaaattaaagaactgcagatataccctttcaaaggaaataaaaaccacccataattatttaaaagtgactattatttcttttttcacatatttatttttcctttaaaaaagtcagatcatattgtctttatgactttttcatttagcattatattgaagaatctatctttattaaggccttatagatcttcattaaggtttaaagaaggttttttccatggccttaaattggttcacctcctcatttgatgacagtaggattcctcatggatgtagcttgagattctgttttgtggtttgcacttctctcttcttgagagccagttatgttttactcatgacctcaggcaagtaattgacttgtttgcctctttatttatttgtacaggaggaaaataactgcacttctcttggagtggatgggaggggtgaacaagcagaggggcctagtactggtgaaagctgtagcaacagtggccaccgtggagcaggaggggcaggagaggtactaccatttcccatttggtacccagaagccagacactgagggttaagttacctgtcttcagcagctgttgacccaagttggacttgggcagcatacaaatgagagttagcctgagccctgggctggggtgggttggttcattgcaaagatggagctcctccggctccttccctcatcctcacaaaccagaggaagtgtatttggttgaaaatgacccacatccttcaccaggcatgctgccagcagcagcatggggcagctgcaaggctgctgcttgggagttggtgaatggcctggctgccaagagccccctgggccaggggccacccacacccaccctggatattgaggctcagagaggcagtgctatttgcctaagtcaggcagcttgttagtggcagagctgggatttgaacccaaggcttttccactgcatcttccatgttagactcattcaccctgtgagttggaacacccattatgtgcaaggagctccagcgctcccacagggtgctccagacatgaagaagctatggtccttgctgaaatggcacacacataatacaggagatgctgcaagagccaaggatgccctagggacacttatctggttcattccttacgcatacactgtgccaggctgtgtactcagcaccatggacacgaatgtgaacaagcagaccacagagggccagcagacagcaaactgccagcagattgaggggcagagagcactgtggacagcagagggctctgggcagcagttcctgggaagaattgttgtggtgggacttaaggttgggctatcccagccgcagtgctcctgaaaccaggggcacagtcttggcattgaatggtagctatgggaagggcttttgaccaactcacctggatctgaggattctgctacttaacatgctgtgtgaccttgggcacatggcttggcttttctgagctttttccttgtttaaagaggatactattatctgcctcacagagtgggtgtgagaattaaatgagaataaagggacttgaatgtatctccagcagccatgtgattattgtcatcagggggtggcagcaagtgtagagaaggcagggacacgtttggggttgacattgcacattatagagtgaaacataagtggagcccaaatgctatgcttatgtgacacacattgtcctagtaatgatctcatgcacctgctgcacaaataagaaaggaattgtagcctgctgcgcatggctgccccttgagagaggaggagaggagttatttctggaatttgccccaaggtatagcaggtcccttttgacttggtcccacagtgtacacccagtcctgttgggcatttaaggagagcttgctcatcttgaagaaaagtctcctaatgcccagaactgggggatggggattaatggggagatttctggaacctaggcatatttcctgctgctctagttattaaagcagcgcagggcatctgggcggatttgttcagtgatgctggcaggcatccggccccttcccacactccatagtgcagactgcttggggtctaatcctgctgcggtggctttttttcttttctttttccagctttattgaggtaaacttgacaaataaaaactgtgttatttaacgtacataatgtgatgatttgatgtatgtatatactgtgaaaagatgaccacaatcaagctaattaacatatccaacacctcacacagttatctttgtgtgtgtgtgcttgtgtgtatgtgtctgtgtgtgtggtgagaacgtttaagatctactctcttagtcaatttcaagtatacaatatagtgtttagtcacatcgctgtagtgtagatctccaggatttattcatcctgcatgactgaaactttgtactatctgacaaacacctccccatttcctctgtccttcagcccctggtcaccagcattctaccttgtgcttttcccacttctgggtatgtatccaaaggaaatgaaatcaagatctcagagagatctgcactctcacgttcattgcagcattatttacaacagccaagatatggaaacaacctaagtgtttgttgacagatgaatggataaagaaaatgtggtatgtacatataacagaatattatgcaaccttaagaaaggaagggaattctgtcatttgtgtagcatggatgaacctggaggacattatgccaagtgaaatgagccagatgcagaaagacaaatgctgcgtgatgttactcttgtagaatgtagaaaagactgtgacttattaacttgacaggcaataggtcctgctcttgtcagcctcctcatccatagcaggggagcactgtgttatcccgtggacatgtggataacagtagtgccaacctgattgtggtactgtgagggtaaaataatatatgtttaaagagcctgacagagtgcctgtcaccatgagcgctcaagtttttgctcttgggatttggatatctgcctatcctttgctgttccctcctcagggaaactgtcatcctcttctctggccagaccctggttcttcttgggttctcctggggacctgtgtgagatgatgggataagtgcaagggcagtgacaagcagggaggcaggtgggtgacttgggtcaggaatcccatgggtttttttttttttttttgagatggagtctgtctcctgggcaggagtgcaggggtgcaatctcggctcactgcaacctctgcctcctaggcttaagcgctcctcctgcctcagcctcccaagtagctgggattacaggcgccaccatgcccggctaagttttttgtatttttagtagaaatgaggttttaccatgtagcccaggctggtatcaaactcctgacctcaagtgatcctccccaccttggactcccaaagtgctgggattacaggcatgaaccactgtgccaggccctgcagatcttttcctgtctgcctgcagagccctcaggtacctctctgctgattccggcagcctgacccacccatggggcctctcagtgaatctatcttgtcctgagggagaattccaaggctctcagtccctcatggaagggattttagagggtgtgttatccaaatagcctcccaggcagggcttgggctgtttctgcctaatgcttgtatgtgtggaaggcaaggtgctcactgttctggaggcagcctatttcatttggggacagccttggcaacttgggttttgagctgaatctcacttttatcctctagttctccctcatggcgccaaggttctcccccacccctttttttagagatgggtctcgctctgttgcccagtctggagtgcaatggtgtgatcagggctcactgcagcctcaacttcctgggctcaagtgattctcccacctcagcctcccaagcagctgaaactataggtgtgcaccattacacccagcacatttttaatttttttgtagagatgggggtctcaccatgttgcccagactgttctctaactcctgggctccagcaatcctgcctcagcatcccaaagtattagcattacgggcatgagccactgtgcctggctcaccaaggcccttgagcaccttcaggtcccttgagagaggtgacctgccatcccctgcaacttccctccccactctggccctgcagcctcgcttgctccctccggcctttggccctggtcctgcaggtctcattctggattcctcaggggagcttcatcgtggccccaggttcttgggtgactcttgagccctcttaaagttgcagccaaccttggatcttaagtggaatgaaagatgttaaacgcttggtgtgtttttcttttcttgtcatcaggggctgttggtcatgaagagtggagttcaggggcagggggaggtgtttggagtctctcattgaggcctctgtgagctctgtcctggctgtggctgagtggaatgtgtaggtcctgagggttcagagcatgacagctagaagggccttcagaggccattcactcctggttttttttttttttttttttttttgcagaggtctcactctgtcacccaggctgcagtgcagtggtgtgatcacagctcactgcaacctctgcctcccgggctcaagtaattctcccatcttagcctcctgagtagctgggactataggtgcgtgccactgcacttgactaatttttaaatttttcattgagataaggtctcactatgttgcttaggctggtctcaaactcctgggctcaagtcatttctctgcctttttttcttttttttttcatttttgagacggagtctctgtcgctcgggctggagtgcaggggtgcaatcttggctgaccgccacctctgcctcctgggctaaagggatcctcccacctcagccttccaagtagctgggattacaggcgcagcacttccaaagtgctgggattacaggtgtgagccactgggcccagccactcctggggcttttcccctttattggtcatagccccatcagagactctaaagagtatggactctcttaatgtaagaatgtcaaaacataaaaaagttcgcatgtgatttcatagactctctaaaagccatgcacaagcccagagtaagaacttctatttgagtccttctgcattctttatatagatagagaaactgaggtccagagaggcacccacacacctcacagtcattgataggagggcagagggggcctggattggctcagccagaggcagggctgggccatgtgtggatgggagcaggattagcagtggggagatgagcagggaagaggaccagagggacctcagcccggcgagcagtggcctccagccctgcactggaggctgggcccaaacatgaggctgaagtaggatgcggagagttggttagagatgtggaaactgtgcttagtggttcaagagaaagtctgggatagggaggacgtgatctttggccagtgaaggtgccagacccaagtagaacaggtgttggattggaaagactgcatagacacagacatactgttttagaattttacagaggaggaaactgagtcccagcaagtggcaggcagctgggataaggtcagtgcaggtgggtgagttaactcggagtcttttggggtggcaagtgattcacattatttcattttaataacttatttaaatgcacatttgagaaaatatagctggtacacataatttattgctaaggataagtctaagaggaaaaaataagtagatttaaagacagatattaagtaaacagtagtgggggtataaagatatggtaactataggaagttggcatgaaaaccatactgtttaagacctggctggatgaatgactgacaaatttgatctagactgatctctgagcctccaagcatggactcctcttaggagagagtagtacccaaacacacatgtcctctaccaactccctggggtgggcttcttctcaagaatagtgcagagaaagagggagggaccctgtgaaacagttaagttaggagagggtagtacccaaacacacatgtcctttaccaactccctggggtgggcttcttctcaagaatagtgcagagaaagagggagggaccctgtgaaacagttaagttaggagaggcgtcctcctgccgtgtgacttgggtcagcttgttaaaggaggcgagaaggcaggggagggaatatgcctgggcatgtaaggctcatcgggacctcggttaccatttcacctgtgcaaattttcaggactgagtcttttctctatactgccccacgaggggactgacattacttaaggcctctctccaggaccccgagctcaggcctagcccgatggagcagaaccatctctggagcagaaccacccctgaccagaagtccaaagatgtgagactggggtcaaatctaggtttactcctagtcgagaaaatgggaaggacaatgtcatatctcctctggtctgtgaggtcgatggctgtaaaagttgcccagtggtgaactcagttaggtcttatctgttgcagattatgtcactccacccctctgagacttcagttccttatttctaaacatcgaccagcactttgggaggccgaggcgggcggatcacaaggtcaggagatcaagaccatcctggccaacacggggaaactccgtgtgtactaaaaaaaatacaaaaaattagccaggcgtggtggcgggtgcctgtagtcccagctactcgggaggctgaggcaggagaatggcgtgaacccgggaggtggagcttgcagtgagctgagatcgcgccattgcacttcagcctgggtgacagagtgagactccgtctcaaaaaaaaaaaaaaaaaaaaaatggagataataaagccccaatctgtgagattgttttaggattaaattagatagtgtatttaaagtacttgacaatacctggcacatagtaattgcccagtttatttaaggctgttattttaataaggagttttaaaaaaaatgaatacatatagaaatgttgtgattactaatctgtgaaccagtagcaaagctatcacctctgaaccctcaggcaaagcttggaccttacaaatgatgttgccaccttgtggcagcctactcaaattgcaggtttagtgtttttattttaagtcttgtttttaaatttatgattatgattatgataagaaatcagaaaatctaaagttatgtggtttaggcaacaaggtaaccaggaagaacaggctaaaataaaatatctttactggattaaaaacagagtaccagacctagcagagccttaataatcagttaatctatatatttaaaggtatcgcttattaaggtctttttctagggcagacagcttgactagcactttgcatctatcctttgtagtccatcctacttagcaagatcaatattattagtgtcatgtatttcaaaaagggaaactgaggctcagaagtaactgagtaacttgcctgataacacagagctttcatgtggcagagctggaaatgtgaaccaggcaggatgatgattaaacctcctagtaagtaacctctcaaccaaaatatctgtcctgttcctggattctagagggtgtcacgggctgcattcttgatttctgccatagggcctgggattatactctgcagtcctgcccgtgtccttgacagagcacaatagcacccatcatgatttcattggattctactaaaggcaaatatggggtgattattaaattatctgtcccctcctcctcactgctccctgtccccccacaaaggcagttaggtggcctctttggggaaagtaggttttctctgaatggctctcagagaagcaggtttcctgcttgcactttgagaacctgcatctggaaccagcccagaggggtggtagcagggctatgaggaggaaacagaaccagcatgttcctttccaagttggttcagctgacgaggctgtcggagatgaggaccaggtccctgcattgagtggctagagagctgtcctggaaactctttggtccatggtaaggatatccctcatgccaggggaggaagtcttccttgcactagaaaacaacagtcctctttctgtaaagttgggcatctcggcccatttcccttgctggctttgctgggagaggaaggtgtgggttggggtgttcggttcacagtggtaagctttgggacctatgtgggtgttcatgcagggaagtcccagagcccacacatgcatgcttgtgcctccagcctttttccccgctctatgagatatggtctgggagaggcagactagaaagattccttgataatgaatgattgtttagaaatgatggcttattcaggactcccaggggaagagccttcttcctgatttttttctttgcattcatggagacatcaggaagctttgaaaggctgtgtggagagatggcattaggatgtgctcacagacatggggtctcagagtaagcagagtcagatcttagaagatgaggctggagcatcattcccattgtaggtaacaaccctagaaatctagaaccctctcagttccttcccaagtaagaaagcctgtcttaacatccctggaaaatacagtatctattcagctgtgtagctccagggactgaacattctcactggggtatcccattccctttggacatctggcaggatcactgagctggactccactcctctggaactctcttttgtctacaccagcggtctccaacttttttggcaccagggactggtttcatggaagacagtttttccacagatggggttgggggtggggggtggcggatgcagggaagatggtttctgcatgattcaagtgcattacatgtattgtgtactttatttctattattattacattgtaatatgtaatgaaataattatcaactcaccataatgtagaatcagtgggagccctgagcttgttttcctgcaactagatggtcccatctgggggtgatgggagatagtgacacccaaagtgggttgcttatgtccagtctcctccgtaatcttgttttggttgctgtcgctgcagaaaaccctgcttcacagggataggatgttggaaatagaagcaggcttttcagtgctttgtggcagtctccggatattccgccttgattttaatccagaacgtatggagatttgaagttgtcacaaatatatttttaaggccaccagatgcagcttaattggcacttgccactcagcgatagggtttttctttagacaaggtctggctctgtcagccaggctggagtatagtggtgtgatcttggctcactacaacctccacctcccaggctcaagcaatcatcccattttagcctcctgagtagctgggactataggcacgtgccaccatgcctggctaattttttttttttttttttttgagacagagtcttgctctgtcgcccacactggagtgcagtggtgccatctcggctcactgcaacctccgcctctcaggttcaagcgattctgccacctcagcctcctgagtagctgagactataagtgcccaccaccacgtctggctaatttttgtattttctgccacctcagcctcctgagtagctgagactacaggcgcccaccaccatgcctggctaatttttgtattttcagtagagatggggtttcaccatgttggccaggctggtatcaaactcctgacctcaggtgatccacccacctcggcctcccaaagtgctaggattacaggcgtgagccaccatgcctggcataatttttgtatttttttttgtagagatgagatttcactttgttgcccagactgctcttgaactcctgagctcaagcagtctgcccacttcagcctcccaaagtgctgggattacaggcgtgagccaccactcctggccactgatagagttttgatatgagtctgcaagcaattgatgtattatgatctctgtgcagtcagacctctctgctaatgttaatctctatttgcagccactccccagcactagcatcactgcctcagctccacctcagatcagcaggcattagattctaataaggagtgaacaatctagatctcttgcatgtgcagttcacaataggggttgtgctcctatgagaatctaatgccgctgctgatcttacaggaggtggagctcaggcagtaatgcgtgccatggggagcagctgtaaatacagatgaagctttgcttacttgcccaccacttatctcctgttgtgtggcccggttcctaacaggccacggacttgtaccggttcgtggcctgaaggctggggatcctggtctgcactgcataacgtcttatacttttctcacttacaaatgacaatggcaatgtgatatgctgccggagccaggcgtcaggaggcacgttcccactgattcggggagctcatccaggaggggaagtgcttctcctttggtctttccccatggctgagagacaccccctactccccggccatgccctcgtcctctctgggcttcaggtttctcacttatacgttgaatgggggctgtagtgacttcctgttgctgctgtaacaaactaccacacatgtagtgccttaacacagatcttgccgtttcagaggtcagcagccaaacatgggtctcactgggctgaagtgagggtgtggcagggctgcattccttcccaggggctccaggagagaagccattttctggccttttccagcttccagagactgcccacattccttggcttgtggccccttcacttatctccttctctggccctgaccctgaccctgacccttctgcctccctcttaaaaagaccctctgatcacactaggcccacccaggtcatccggggttatctcccatctccgtattctgaaccacatcggcagagtcccttttgccctgtaaggtagtatcttctcaggtttgggagatcaggacgtggacatctgtgggggaccttatgctgcctgctgtggtggtgcactcatcatctccagagccccctcacctctgcagcagccagtcagcctctgtcctccctcagggttgtgggagcccctgccttccttttatatatccttttttaatatttatttttatttttaagacatcatgcctaagcccctgccttcctgccagatctggcctcttcagggggagaagtgcaggagatgaccacttcagtctggaagccttcctctctggctgtcaaattctattcaacttcttaggattcaagtttaaaaaaaggcgagaacactctaattgtttccttcctagaatcatgtgtcttttgccccatagcccctcaaagtataaagacgtacaggacatcatcgcttcctccaaaaagttgaagatccagataggggaagatgtgggtgcccacacaaagtcaagactgtttacttccaggcagttatcagctgtgtcatcctgggcaagtaacttaacctcttaggctcaatttctttacctgttaagtgcaaatagtaggaccttccttttctcccaagggttgtgataagaataaaatcaggaagccgaggcaggaggattgcttgaggctagcctgggcagcatagtgagaccctgtctctaccaaaaaaaaaaaaatctgctgagtgtggtggcacatgcctgtagtcctagctacttgggaggctgaggtgggagaactcttgagcccaggagttcgaggcttcagtgagctatgatcactgcactccagcccggacaacagagcaagaccctgtctcttaaaaaaaaaaaaaggaataaaaattggagaatatattgaaacacaagggttgattggaatagtatgagacaccttgagtgataccgaagccatcataggacttgattaaatgtgacacaaaattattacagggtcagggcttgctgtcgtttatgtgggtggggctactctgcagacgaggacctcaggctttgaaggcccctcatcattatcatctccaaacttcatgttctagaaccttgaaggaattgggtggctggtttgttgagagcagggtgagcgtacaaatggaggctccccgcctgcgtgtggggggccgtgtgcgcatgcaggcggatgctgcacctgcatttctaagtgccggccaccattttccctgcaggcagccactgcctggtcacaccttgggtctaggaatgtgtaacccccactgcacagtcatcctgaggatgatgggcccaggaagagacctgcataggcccctggaagcaggctcagggccatttaggtggggaaattggggtcccaaaggcatctgcagcccaggtaggcaggtttccttacacaagtggactcccagatctgtggggagggaactgctggaggagggccagagtgatgcccctgaagggccaagctgagggcagggccctgattgcccaggtctgaagggctatggagatattctagtcaggtgtgacagcagaggtgggcaggggatggggaactaactgggtatcgtcttggacctgtgaggccagatttaaggcatagagtaacaggagccacctgttaccgtgtcctacataaattatagcaagaggagtattttcttttcctctgccagttttcatgaaagacagagcaagccgtattcctttttccttgttctttctgtttgcctagcaggcagcactccacttgctccgccttacattcagtggtgtgctgggaaatgcataacaactggttctggaggtggggtgaggtgggaggctctgagttgtagcattttcaggtgtccaggaagtaaatatccccaccatggccaatttcatcctgtttaagtgatgtcactgaacgttgtccccaagctttagcattctgctttacattctcattttaatcctcaagcaactctgaattagttgctgttatcccagacttacaggcaggaagcaggctcagagaagtgaaggtttccaacttagacgtgccaggctgtgcacaggtggggacctctgaggggcctgctctgatctgggttggggctgccccaggacccttggaggagccgccaccagagcaatggtaggtgttgggccagaggttgtttaggtggcgttggtggtgaaggctttttctgtgagcttgttgggttgacgattgtgacatgctgccgggagggtgttgggtagacacatggttgtgatgtggcgatggtgggttagggtacggtagtgtgcgtgatgtgctggctgtctcgggatgcggtgtttgtgctggtgatgcagccagtctcctgtcatggtgtgtggcacaatggatttatttggctgaggaggctgcatggtgttgctgtggtgtttgctgttgtattgctttgctagggctactgtaataaagtaccatagactgggtgacttacaccagagaaatggattttctcacaattctgaaggccagaagtctaaaagcaaggggtgggcagtcagcttactttgaggcctctctccttggcttgtagatgggcatctttcccctgtgagttcacgtggtctttggtctgtgtgtgcctgtgtcctgatctcctcttataagggcaccagtcatattaaattagggcctattgtcgtgacctaattttaacttagttacctctttaaagagcctggctccaaatacagtcacattttgaggtagtgggtttagggcttcatcatatgaattttagggcaatgcaactcagcctctaacaattgtgttttctgtaactgctgactgggtggcggtggtggtgattcctcggtggggtttggtgtgacagtgtttgtgaccttgtgaagatatttgtgtgtgtgtttagtatgatggtatcctatgccagtggttgtactgtgaacatacctggtgcttaaggtaaaggcgctggctgtggtggcgttgcaggaggtgtttggggagatggtctttgttgcagatattttctattggggtatgatgcttggtgtttgtgagatattgttctgcccgtgtaccagctctgcccatgcttagagtttttggttaacagtgttggctgggctgatgctttcagtctgtaccttcttggtgtttggggcaaccccacaggctgcagttcaggttgtgaggcaaggactgctgtggtcgtgtcttgtgcagccagatgagagctacatgtctcttactaatccaaacagcctccagaggaaacaaagctgtgcctcctgaagcttgatggaagctgctgcatgaccccggcctcctgccggcctgtctgccatgttttgtgcagctggtgcatgggtgagcctggcagctgaccctcctcagccagtgctgcctacacaggggaagacacctgcggctcctgctctgccccgtgggcaggagtggggcaaggcagcgtctactcttaggtgtgtctcagcctggcccctgcctggctggttgctctgttctagcctggtccctcccaggtccctcctcacaaaaggcagctccaccttcacagacaggggtcaggaggaggacagacagatggaaatcacatatccaaatcagtgtgtagttacgcactgagaatgtgaggaggctaacagacacggtgatgggaggcagagcggccgcgggagggactgagatggggccggcagggtggccatgtgctggaaatggatgtgtgaggtgaagcgcttggaggcgtgggggaggctcagctcccatccctctcagatgggagctgagtgcaaacttcaggagggaactggctgcccagcgtgttggtgactctcatgagaactggggactgtgggcggggctcagcctgccccacctctgctgccaggcaccccactggcatttctctggaatgttggtgctctgtccccagatgcatggcagcctgtacctgccagtcagaaagcaggtgtccagtggtgagcctcagggctccagcctgagccctcctgctttggccactgtagcaccagttaagagagcaaagaaggtacttgtcctgggtccccctttcagctctgacctgaattccctttggggagaggccatggtgacatgggcatcagagccccagcggaaagtccaggggtggcaccttgcagcagccatgaggcagagagcctgtggagtcccctgttcccccctagtgaggggacaccgtcgtagagaagtttacagaatgggtgtcggggcctgagttaaagttagtgttgctgctactgactgtgtgcactgggctccggtttcctcacctgcacagcagggctaaaaatctggcatagccctgggtgctgtgaggttgccatgagatgctacaggtaaggcatatagcatttagcagtgagccgggcatatagcagcggatcagtagaggtctgcggcgctggtaatccttctggcttctggtcccacgatgaccggcctgaccacaataatcacatccgagcattagcggggattgggatgatctctaggactcccagctttgacattcattcatttgttcattcattcatctagcatgcaggccacacctcttaggagtttgtctctatttagggtgccagggctttagggacctgtaatgactaggtccctgccccatgtgtgacctggcagctgggcaggcctgaacctcaccccctctccctcctgcctctggccctatactgacttgcagaactccatttgtagctggatcctcaggccttctcagaagatgacagattctccaggatccactcatgggagtcatggagaccaggctgctgctttgggagttgagagcattttgtctagtggttgggttctatccctactcgcgcttcccaggatctagatgggctcatctgggactcagtggagcagcatgtccccacagccagagagccgggcgagctgcagccacagcaggcaggggaaactggttccacaattccacctagaattgcttcccccttctccctttggtgggctgtgttcattggcagctgagggttgtgtaggggtggagtagggcagctccctactgtggaggcctcctgccagccccacatggctgaactatcacctcctactctgggcgttactgtagaagccataactacagcccagtgggggcagaggcagctgagaatgcacatttttctgtggatctggagagggcagggcatagtggtaataggaggtgatatggagcctaggttcttgtccccactatcatcacggccttgtgtaaccttggacagcttccgtggccctgcaggtcttcaacttctttcccttcacagaggctcagtgattcttgccctgcctgccgcccaggttgcttggaggatgcagtagggtgacgcatgtggccacagggataaaggtcgtgactgagatggtgcaggagctgagatgcgcctttcagcacccatggcagacagaacgaattcagtctccacactcttacccctgagctccaagaggcctcagaatccactgcaaaacaaggcttcaggtagtcctcccaattaattgaagctgacacttgagataaacattttctgagagacctagaaaggcatgctgagtctgcagctaggcatgccttgtggtaggggctttggctagtgatgcccacactcttccctgtcctaggatgggagccaggaagcactcagggatctgagctctggattttctgatcagattctgcctttggatctccttctccaattcaccccctacccccttctctttctccacatgcaacaataaagggagttgtggcattaggtgcactggactgtctaaagaaagtaaatcagattggatagaaataagtccttccattttcctctccctgacctaacaaattcttatgacataaccaagctgtccaaagccagtattgccccctagtggttagcatcaagaatacatagactgcccaaccctcttcccctccacctccttctctgccataccaagataccacctcttttcctctgtcattgttactaactttctcttcatacaagtatgtttctttttgaacccctgtacattctattctaactctaataggtgtcatagaaaaggcagcagagtgtaggtgatgaaagaacattggactgggagtagtaggggctgaaccatagcctcacttctgttgctagcttgcaatgagaccatgggcaaattcctttccctctctgggccttggttttcctatctgcactacaaaaattctgccttatgcagcgtttcccaaaagaggttccaaaggttttttttatttatttatttttattttttcaacttccagcagcaccccaaagctttttaggctggacagttttgcattgtgtaggactgccccaggcactcaggacagtttgcatcccagatctccaagtcaaatcattgtggtaggtggaacacccacatgctccctggcagtaatactgctgtggttggcattcgttgaactaggggatcttgagagcatgtgtaggtggttgctggtttgatgagagttgggtgggtcgttggtgtcagctgcagctaggatgcaatgaagacatctggggccctgggaatgacccacccagaggccaccattgtagtgtaacggaggcactgtggcctcagcagttagccccacattcacatcccctctctgccacttgctagctctggggcttcagacaagtttgagcaggattgtgtatgtggttctcagttgacaatggaaatggccccgtaaccttttcctgttggcagcggacagggagaggctctcctggcttcctgcactctgcacacacatgtgtgtacacacccttgctcttgcccagttcctggtcccgagtccttccccaccctcagcccagctcttccattattgttaatgatcatgtccttgtggggagccctttcagtttgcaagaaggaggttattcccattgtgcaggtgctgggcctgagcctcagaaggtagtgtggtttcccttaagcagcaaggcgaggctagaattcagtctgaatctgttcttcttcttgtttttgctgaggcagttttgtggcttttttcatctacgatttatcaaaagcacttagtatatgccctggctttagagtcattttctcaattttcccaaacacacatagaccgacaaagacccctgctcaccacacatgctctgcccactttacagatgtggaaactttagagggaagtccagaaacacatgccacggttgctgagctctctgtctgcagaacctgttcccttcctccccccaccacccaaactctcctacctccttccaaaagccaccaccccctgggccattggcagcccctgcccggttgtgaggcctggcctgagtggtgctgacaatcaggagtgggagggggcctgcctggctctgagctcaggagtgtgttgggaaattccgccaccctcccacgcaggcagggaagagttaagtggctgccttgtccctcatgggtcccagaggcctcttcactccttttacagactgggtctcctaaggaaactgccgggcagccggcccctcccccagcatcctcacatcttgccttctttggtcctctctccccatgagaaccacaccacccagggcctctagcttcccaagatggggacacttggaagtagagatttaaaaactgtctttgtaacacacacacacacacacacacacacacacacacacacacacagtatccggctgcttgtatccatgtagcagtgcccccctccccccccaccacagacacacacacagagtacccggctgctcatatccatgtagcatcacacacacacacacacacacacacacacacacacacacacagtatccggctgcttgtatccatgtagcagtgccccccttcccccccccacagacacacacacagagtacccggctgcttatatccatgtagcagcatctcacacacacacacacacacacacacacacacacacacacacacacacagagtacccagctgctcacattccatggagcagcaacacacacacacacacacagagtacctggctgctcgtatccatggagcagcatcagctgggtctcagcaggtgctttgtcttggaggggatgacagaagggaggcagcccctgacccaagagtggtgaggaggcctgggttcctggcaaggctttagtctgtctgtctcttacccgccagtctgcaactccgtgatgggagaagaggtctgtgagcttccctgacttagcctagccctccagtggccagagagactccagaggcagggagaggaggctccaagcagaagcggggctcttgggctccctgggttggggaccttcaggactgtctcatggagagtacctgcatccctgccatcccaccaggtagtggccacacagtcctcatgacctcccacagctgcttgcggctgccattgggcagctctgatggtcacaagggcttccttagaataaatgagctgcagtctcagctcccaccatagcctgggcttggcgtcgtgggccctcatagagcaaggctcacccctcctgcaagtcacagcccttcacgccccttcctgcccaagctcccctaccagcaccccaggccacaggatctgtcactgcttggctgtggctgggtgaccacagataaaacctggcactcatggcctcagtttcattgtttgaaaaaaggaaagttttatggagtgtgtgtagtcataaaaccatcctcttttttccaggattccagaaaaagagattatccagaaagttttagaaatatctcacaggggagatgacccatgcctagcatctgtgtttgagagggagtttcgtcacagaccagtgtctagggagccctagaaagctgttactcccaataaggcctagtttttgaatgtcacaaaaactagactcctcagaaggaggagactccttgagacaaagtccagactcctcgggacaccaaaggcccatcgtgatctgaccccagccagactctgaatctgagtgcagcccatggaaaggagtcctgaattttgagtctggtctctgctacagcctggctgcactgtctcagattgccaggcctctctggctttgtcttcccactgataagatggggatgaggcttgttagagttcagtggggtgagtgcatacaccatgcctggcacgatctcagtgctgctcagtaacaaatacaatgggcactttgcgtctgggggaggggctgcctcttctgccctcaaggccaagttttgaaacccccatcttcacaaagtgttgctggaccacttcaggcaccactgcaacatccatgccttcaggaggtttttattgaacatctactgtatagcacacactaaggatacaacagtgaaaagaccagcaggccactgcatccctggagctctctagagagagagaaacaaggagacaaatcagataaaaagcaacatgctctgggaagtccagggagggaggaaataatgggagtcagctggagggggcaacagggaagcctgttccaggagtgacttttgagactacctggcaaaaaagagaatttgaaaaggtctggaggggttccaagaggaggccacaggtgtgctggggaggaagatgtgagaggcctccggaggtggcaaggttagggcatgcctgtgccttcccacgacactgtgtgctggggttgcccaggatgtatccgggatgcagggagaggcttagtgctccatgattgagaaaggagtagatggagccccttcccagccccttcccctggccttggtctgcacaagatctctcctgtttgctggtgtcattttcatttcctaataccctctggctggcagcaagtgattgactgtgtcctcagcccaagatgctgaaaggaggtctgagtgaaagggctttccacctaggggagtgtaaggagagaaagctgggatgaattcctaggcccacaggtacaaagcctgtttctgctgcagggtctgggagctgggagacagacgggagcagagccgtgtgtgattggagcatcgaaaacccacacacccagagcacaggctccagcgcaggatgagcagccagagccccgtgtgaccacctggccccaggcctggccggttcagattctcatccttactggtcaccagctctcagtgtgtgacccacgttggctctcctgaccttgaattgggtgcaggatttcaaatcaagccttaactaatgtttagtgggcacagtcccagtctgggaggaagatgtccagctctccactgtctcagcattgaacctgagacagggtccctctccctctccaggcctcggattccccatgtgtacagtgagaggtttgaactaaaggtctctaaggcccttgttgatttgatgatctgttattcctgttgttctagttttgcaggtccttggcagtggaggggtagttgtgtgtcagcggttagataatgtgaagcatagttaatctcaaaaagttattgataattttaaacattaggcacattaatagaaagctggggcctagaactagagaggagatggttctgtcaccaaagtagccaaacagatatgctctcagagaaaacagaatcaaaagcaggatgactgtaaagcaggtgttcttccacatgggtggaggcagtagaggtgtgcagctcagaggaaacaggccacctgcaaacattggcacgggagaggcgtggcactggtaagtggaggtcagaaggggaagttctggctcgagctaagaaggggctttccggcagggcgcggtggctcatgcctgtaatcccagcactttgggaggccaaggcgggggaatcgcctgaggtcaggagtttgagaccagcctggccaacatggtgaaacccccatctctactaaaaatacagaaattagccaggcatggtagtgggcacctgtcatcccagctacttgggaggctgaggcagaagaatcacttgaacccgggaggtggaggttgcagtgagccgagattgtgccactgcactccagcctgagtgacagagcgagacttcatctcaaaaaaaaaaaaaaaagaagcagctttctgaatgaaagatggcatgagctggcctgccttgggcagtagggagcttcctgtcatgggagatatgagagggcaggtgcatggtcacctgacaggttggctgtcctttgtcctgccgttctgcatagctgccattctgtgacctgggatcaggtccaggcttgccaaatgactttgggtcagtcacttagcctccccatgcctcagtttcctcctgtgaaaaggagagagaattcctgtctgcctctcagtcttcttgtccagatcagttgaggtgctggctatggagtcctttgtgtgaacaccactgaagcacgcaagggatgtttcttgtttttccctctaagttgtctgcttgccatcatgctgccgtttgagtggccagcaaggtgggggaaactcttacagctcaagctgacctgatctgctgagctaaatttctgctttacggaatttagtcttgggagcaacagaatgatgggggtaaattctaaagcaggaaaacaaaacttggcactagtgctgagggatgtcctggccaaggcagacatcgctaatcaatcaccacactctttcctgctgatcttggatatatggtctcataacctttacccatacaatgacagctactaataaccctgacaggacttggcctgtgaggtaaactctatttgccattccttagtaaagaaaaacaatcattaatgccattcctggtcagtaccaagcaagtgactcagtaaatgcattaaggggaatatgtgcattggtgggaagtgggggttgggacagctgtgagctaaattaatttagatggggatggcttcttggtggaggtcgtagtgggctaagcccaagaagaagagaggggagattaagagaagaaaagggaagtaagaagggcacactgagccattagcctggcataagcaaaggctcgagttgtgggctgggagaaggctcctgatcagcttggggttgggtggccctggcttgggagtcggatccctgtcactcatttactgtgtgaccttgggtgtggccattcctcttgtataagatataaagaaactcttaaaaattttttttcttcaaagatgaatatctgcaacatacacatatacaaccttccttctccccaagcagtgggttcctaatgaatgccttgttggtggcagcatattaaagtgagatccaaatgactcagaaatctgggggctggaagcagtagctacaccaggattgttatcggggaagaaggaaggatgtgggccgagtgggcctggacggctgacagatccccagatttctagagaatggagtattttccctgaggtcagcagaaggtttgggcccagagcagctgagctggatatctgggcctctgtaccatttcaaggagcccttttattttcagccaagagggaggggaggctgggtaggggcaggggttgctgaagggttctcatctattaatagctgggatttggggtcacgaggccccgggtgctgggatggcctgatgcctggccttgccagccaatcacagggccgctgctctagggtcctgcacattagcaggttccctattgtgaacccacagggctggcctgggctctggccagatgttcaacattccctcctgacccccagtgggcctctgaggggctgccaagtgtccactgggacagaggtagggagcaggaaggaagaagggaaaaaagggcttgtgtgaatgcagccagtgggtccaagcttgcaaagtagataggaatgcagggtgcttatggtagaggttcctgaagtgggcagtggaactcctgggtcctggtattgatgtcacactggaatgagagataaagagagagagagagagagattgttggcccactcaggccttcttcacccctgggccacatttgttcccctcctgccatactcaacaccccagaggccaattagttaatttcctctaagatgtgcagccatcaatggaatgatagaactccatttgccattttgccctgttgggagctcagaatgggctgcacagtttttcataaagagagtagcatatcagagtaaaggggatcaagtgaccttaatgatgactacataggacctgagagacaatttatggactgaagtcatgaccttgggggattcttttgacctttttgggtccttagttcctcatctgtgaaatggagaaaacaccagcctcacagggatgttttgagtaccagataagcgagtgtgtgaaagacagagtccacaccgtccagtcagatgggggagaccccaggccagtgcccaggagattataatccaaggagaaggaatggagagaaactcagtgtggtaggagagccccaggctgggaggaagatacctggattctggttcagctctctgctgtctcaccaccgcacttgagacagggtccctctccctctccgggtttcaaattccccctctttacattgagaggttcaagatgagtgtcgctaaggcccttattgatttgatggtctgttattcctgttgttcttgttttgcagatcctgggcagaggagaggtagttgtgtgtgaggcattatataaacaggagcatggcaataaccatctttatacccctttatacccctttataaccacgtttatacccatggcagtaaccatgtttatacccttcacccgtctctgcacacacatgtgtgcaggcatgcgtgtacatacatgcctgccccagcctaggcaagatgggcatgggagaccccctgacttgcctgcctgtggctgaccgcactgttcccctgcttgtaggcacctcacactcagtgtgttcaaagtggaggtctttattgcatcaccccaaccccagccctatttcccttctttcttctacttgggttgctatagtcctcagtcagggagcccaccctaatttatccttcttccttgctgcacatagctgggagtcactgagtcttgccagtcctacccttgaatatagatcacaaataggtccaatccctccttcccttcattttacttcctcccactcagaggccacgctctcacaacggcctgtgaagcagccacctcatggggcttcctgctgccatgtttggctgcatctctgtatgtcagccagagtgcaaatctatcatgtcactgttgtgtaggaagccccccagtggccccctggtcttggggcagaggccacccttaccatggcctagaagtcttttcgggatctggccctgcatacctcaccctcgtccctcccaggtgtcctgagcctcactccagccaactgagtttctttttttttttttttttttttttctgaggtggagtctcgctctgtcgcccaggctggagtgcagtggcgcaatctcggctcactgcaagatccacctcctgggttcacaccgttctcccacctcagcctcccgagtagctgggactacaggcgcccgccaccacgcccggctaattttttgtatttttagtagagacggggtttcaccgtgttagccaggatggtctcgatctcctgaccttgtcatccgcctgccttggcctcccaaagtgctgggattacaggcgtgagccaccgcgcccggtccagccaactgagtttctctcagttccttcttgggtcctaatctcctgggcactggcctgaggtctcccccatctgactggatggtagggactctctttatcactgctgtctctccagcacaagataggtgcctggtgcaggttagcagttcaggaaagaggaatctgtttatatactctctcagggtgaccttgacccttaattacaaggggttctctatactaacagagttcgggagatctggagagaaccctcacccagggtgacagaaaccctggatcccaggcaggcctcttcccatgtggccagcccctcctgggcctcagtctccagtccacacaacaagagattggaccagatgccctcttttaagggcccttctggttgtaaaggtgggataggaaagaggctagcagcatggcctttgcagccaggcagacccaggttagaatcttgcttttgtctctcattggccgggtgatcttgggcctctgtgaaccttggtttttgtcatctgtaaagagggatgcttcttgcagaactgggagaatcaaatgagagagcctagtgcctgacacttagcaagcacacaataaaaggcaccaccctcctttccagtttacaatctgttggtggaacttggcagtttgaacgtctcataaatctttatcattaagattcttttttcccctttaccttttggtgccaggtaattatagagagcctgctgtgcgcttggccttggcctctactctgcctctcctgagagcccagtccccgttcttcatgcacaaagacaaagaccctctgttttggttcctgacggtgccacccaagtggttcaggtgtgtctggagcctgctgtaggttagcgttgtgactgtcagaggctggtggcactccaacctaggttgacactaaatgaggccagagaatagaatggtttgctgagcctccccaacaactatgaggtaagctgcccaagggtccaggacaaggcttggctcagagtgaaggcaagctgagggctgaacccctgacactcattcttttttttttttttttctttttttgagacagggtctcactctgttgcccaggctagagtacagtggtgtgattgctcactgtagcctcgacctcccgggctcaagggatattcctgcctctgcccccatccccagtagctgggattacaggcatgtgctacaatgccaggcagatttttgttttgttttgtttttgagatggagtcttgctctgttgcccaggctggagtccagtggctcgatctccgctcactgcaaccttctcctcctgggttcaagcaattctcctgcctcagcctcctgagtagctgggattacaggtgtgcatcatcacccccagctaatttttgtatattttttagtagagacagtgtttcatcacgttggccaggctggtcttgaactcctgacctcaggtgatctgcctcctttggcctcccaaagtgctgggattacaggcatgagccaccgcacccagccagatttttgtattttttatagagacagagttttgttttgccatgttgcccaggctggtctcaaacttctaagctcaagtgagcctcctgtctcggcctcccgaagtgctgggattacaggcatgagccactgtgcccagcctcgtgacacttatttttgatgggaagattccccaggggcaggagccaagatccagaggcaggcgtgtgtgcagataccttcccagaaactcttgtcacagggtgggctgtctaacccccactggacatgagctgctgatggagaaactgaaagttgagaagatcaaggggaggaatatctttggtagtagaaaagacagacttcagagggttcgagtggagatcagcaaacagcaggaaatgtgggtaaaatgagtaagtgaattaataatagtcttctccttccaacagaagtagaatcctctcccaggcctcagaagtagaatattaatgcacttggtgcctgctgcatttctttcctctagcatcagaatgtgagcgtttgactcttagggctgttttggctgtgttacagaaagccgattcaaagtcacccccgcaaaaagaagttgattggttcccttaactgaaaatgtggggttcaggtttagttagatccaggagctccatctctcaactctgctttcctctgtgagagctccatttccacacaggctctttccagccaatgggagaaacggcctcagggtttcccatggatcagcttagcaaccacagcaagagagcatttcttttccagtagcatcagccagtatcctaaggcaaactcttattgtctggattgggggcacatattcagtcctgagccaatcatgatggctggaaaagatggccctctggttgcccaggactaggtcatgggcccacccctgggcaagagtgtgtatgtgagcttagcttcactgacccacgagagctgggccaggaggcattgctgtctggaaagatgatggaaaggataaaaaccccttgtgcccactgaacctctccacttttatattaaacaccaaattggctccaggttgggattttaaaatgtgattagtaacaaattacctaccataccttttgccggtgtctattgtcacacagaggtgacctgctgatgtaaaattagctgagaacatctgctgatacaatttggtagtcacaaaagtaaggttgtggggccagctcttaagcagtgtgtctgctgagcagtttcttggatgtagggaaagatgggtgctgctgtgatcacattctatctgcagggacactataatctaccagtgagatctgcagggaggttgacacatgtagggacatggactgggctatgagcaccctgtcggccaatcataactaaatgtagaaataactcaagtttggatagaagattttgtctgtacaatggaagggttaggtttggtcacctaccatctgcaatcaattggtaatgactgtcaaaactggatcccttccttacaccttatacaaaaattaattcaagatggattaaagacttaaatgttagacctaaaagcataaaaatcctagaagaaaacctaggcaataccattcaggacataggcatgggcaaggacttcatgactaaaacaccaaaagcaatggcaacaaaagccaaaattgacaaatggaatctaattgaactaaagagcttctgcacagcaaaagaaactaccatcagagtgaacaggcaacctacagaatgggagaaaatttttacaatctacccatctgacaaagggctaatatccagcatctacaaagaacttaaataaatttacaataaaaaatcaaacaaccccatcaacaagtgggcgaagtatatgaacagacacttctcaaaagaagacatttatgcagccaaaagacacatgaaaaaatgctcatcataactggccatcagagaaatgcaaatcaaaaccagaatgagatactgtctcacaccagttagaatggcgatcattaaaaagtcaggaaacaacaggtgctggagaggatgtggagaaataggaacacttttacactgttggtgggactgtaaactagtttaaccgttgtggaagacagtgtggcgattccttaaggatctagaactagaaataacatttgacccagccatcccattactggatatatgcccaaaggattataaatcatgctgctataaagacacatgcacatgtatgtttattgcggcactattcacaatagcatagacttggaaccaacccacatgtccgtcaataatagactggattaagaaaatgtggcacatatacaccatggaatactatgcagccataaaaaaggatgagttcatgtcctttgtagggacatggatgaagctggaaaccatcattctgagcaaactatcgcaaggacagaaaaccaaacactgcatgttctcactcataggtgggaattgaacaatgagaacacttggacacagggtggggaacatcacaccctggggcctgttgtggggtgggaggagtggggagggataacattaggagatacacctaatgtagatgacgagttaatggggggtgcagcacaccaacatggcacatgtatacatatgtaacaaacctgcatgttgtgcacatgtaccctagaaagaacttaagtataataattaaaaaattctgggttggatagtccaaagttgtgctccggcttagcaggaaagaggcctgtgatcgcctagtaatgtctgccatgggcagatattaggacattgaaagcagtagtgtgtttgtcagtgtagtagccattcctttacttttttcagctctcttactttagacatgaatcaactgaacaaatgagggcaaccttagggctcaaaagaaagacaaatgcaagatgggggcttgcctgggaagtgatctgaaaatgcagacttatgtacacaggttgtgtccttgcggaagtcattttccttgctgaagctcactttcctcatctgcaaagtaggacaaatgatccagtactgtgaaccaagcagagttcctaggaggatcagatgaaataataaatgtgaaatcattttgtcatacttacaatagcagaagccattaaatgacactttttgtgtgttaggcactgttctgagtgctttgtttatatcctcatttaatcctcaaaacaattctatgaagtagttcctattgttatcctcatcttacagaaaacgacacttgaacacaaatgtcaagtcacacgcccaagatcacacagctgcagtagtgcaggcagcctggctctggtctcactgttacgaatcccttcttgatggtacttctcactgtagactgtaaagtgccatgcacctgaaagggattccctgaagctgcacttctagatcctttcttgttcaggaactgccttattaacccagtccctcatgaaaatggaggtgaaattggcctgctgtggtctgtatgtcagtctttcagggcttgatgacacttttccaagaccttgtgggaggtaaggaaggagaagcaatgtagacctaaggatctgtccttgatttccagtcaaactgcctgggtttgtttcccgcctctaccacttctagctgggtgaccttgggcaagttgcctaacctctctgaaccttagtttccttgtctataaatagagatgataatcctgcctactgtgtaggattattgtggggaataagtgggataacttaagggatatgcttggtaatgtactaaatactcagtatgagggagtggtggtggtgatgatagtgcagaggtcaaaaggaccagaatgataggcacaggctgcccttcccaggaccagaatcttttggcagcatcatttatgatgatgccctggtcagttctgagcacattctcccctcctagctgtgtggaagcctggtggcttcccctacagaacatcaggctcacttaatctccctggggtgtgcctccgctctcacccctgcacaccctccctgtgcagacaggtctgcagtcatcggcttgagctgctctccctgtccagactgctgtagccccaaaccagcccaatccagagtgagctggtcagtagcctgcacttcctggaggcctttgaggcttaaaatattataatactaggagcacaattgagagagattctgattctaggctgaggcatctgggagtgtacaagtgcccttgtttggggacctgatgaaattagcaaataaatgaatgacaacactcattgattatttgctttcctgtcactcagtgcatttccttctgttgggtgggtcccagtgactccagctgtgagatgggaccgggcaatccactctggagtgtgtgaaacatgcagattcctgggcctcaggaatctggacagtggacagtaatggttactttgttacttgggagcttggttaaaatgtaggttcctgggtccctgccagagatggattcaggatctctggggtagggcccaggaccctgcattttcacaagcttccctgggagattctgcagcaggtggtaagagaaccaaactgggtctcttcttaagagtattctttggaccaggtgtggtggttcactcctgtaatcccagcactttgggaggccaaggcgggcggatcacttgaggtcaggagttcaagaccagcctggccaacatcatgaaaccctgtctctactaaaaatataaaaatttttacaggtgcatgcctgtaatcccagctactcaggaggctgagacacgagaattgtctggggcggggggcggggtgggggcagaggttacagtgagctgagatcccactactacattccagcctgggtgacagagagagactccatctcaaaaaaaaaaaaaaatttctattaaaaaaactgattctattaggtttctccttgtcttccctctgtaagaaacctcactcccaactcttggggcagccaagagaccgtgcaagactgagtgctcattggatgaatgagcacccagagctcctgcttgagtttctagagataagtctctgcttcttcatgagctccccatccctgcaggtgtgcaaggagctccagagcatacccactccagattggggctgggggatccaacctatgggaagagtgtgtgtgatgttgtgatcttatggtctggagaggctggtctttcatagcaaatgtcaatttctgcagaatgggtagtacagaatattggtgctgagagggaatttttttgctgtaggactccttgtcttccctctgcaaatagtcttgcacaaaagctccttgagtaaaggagacagtcagtcgagctgctctgattggcctggtgtccagcagtacccttccctacctttaacaacttctgacagattaagataatgagggcagtatctcagtgccttgcagttttccgtttaaatataaaaggatttgtctataaaagtttcatttattcaacaaacactggatgaatgagcacttgctgggcctagggaaccccaggatacaagttctaagtccttggccttgggttccctatggggaaatgatgctgagccatgggaggggtgtcagtgggacaaagggtgtcccccaggcaaggcttgaaagggcagggtgttgaagagaacagagtggcctgggagggaaggtggggagcgggtggagtggtggaaaggggaacacggtgttcagaggtgctgagatgggactggtcaggatgtttggaatcaagggtgggaagagcaggacatgaggctgtaaaatgggaattggcaaacagagcttgcatcgatagtccctcgggagccagcagggctcctccagtgtcccaggggagacttcggaattttctagtcagcatggagcatggcagaaattttcctccttggggcctctgagatgtggggtgctactccctcattcttcacagcagctccccagaggcaagaagggccatagaaaggccaagaccttttccaagagtgaatcatctccacttttgggagtggtgggacagggttggggatgagaggattggaatggaattggagctcagattcttgatttcatttaaggaatgtgattttagagatgtcggcactaggacgctgggattctaattctggccggcggcactacttttgcttctcttttaaatctttttgtgcctgagttttcccatctgcaaagtgggatcatattcatttctaccttgaggattattttgacgcttaaagaatgtgctgatgaaggataagagcctgaataggatgcagccttgttccgtagttgtattcattcattcattcattcattcattcattcagtcagtctgcatgcttgggtgcttaagacccctttgcagtttgcactgctggcctcggtataaatccccacaaagaggaaatgactgacttcattttgacattcttccttgtatggaaaaaatgcaacttctacccactggagtctcgtgtctgtcctggggatcccacaaaagaagtttgtgccacttctgcttgaagaccttcagagatgtgtggattaaatgatagtagccacagccttgtggccacataccctcagctgcttcatccaggcggaggagaggtgggcctggtttctgggtgaggtagagagtgtgttctccatcatctgggcctccctgtggttccctgccttccccaccctggggtggctggtctggtggactttccctcacacagtctgtgggggcagctgctgttgcttgctccttcctttttgccttcctgagaagtgggtggaggccatggggcagctcttcttggtcaaaggagtgatttctgcttactgggaggagcacctgactcataggagatgttctcctgcaggaagggagaggtgattctatcatcaagtcccaggagaaaaacagaaggaagttggttccccagagcatcctctgtcttctggaaaatcccagtgtgctgtttaaaagaaggcccttatactgcctcccttggcactcatgcagcaaatgtttgtggggaggtgcatcacaccccagtttccccatgccttcagacacatctccagcagcctctgccttctggaatccagtgcagaaccctgaggcagccaaaaccatcatcataaagatcaggcactgttgtaccccaaaccattctccttcagaccccagtgccacttgtctcaggtacagccttacgcttggaaagctgtctgaccagtccactgccgatcagaaacaggacccaagcagaggggaatggaacttcttgaagacagcagacttgtaggaggaagatgtgtaagctgagaccctaaaaaccaacgaggagaaaacagagggagagacgctcagacggaccagcctggcagagacaagcagctctgaagatcccagttctctgggtgcagcactgtgtcggggcaaaggaccccagggatgtgtgtgttactattattccagggtcagcaagctacgtatggtcctgtgcgccaaatccaatcagctgccggtttttgtaaagttttattggaacctagccatgcccgtttatttatgtgttgtctgtggctgcttttgcaccacagagttgagaagtcatagcagaaatctatcttatggctcgaaagtctaaaatatttactagttggctctttacagaagaagttgccaactcccaatgatttgagctatcaagaaagggttaaaattcagcttctgttagagaaagactgggaggtgtgaatctcttggggaaggccttccaagcagaccagctgatgatgttgtcaccccatgtgttggtgcttttaatgaatggtaagatttcagattgtctggatttcataaaattagcaagtgttaaggccaagacaaatgttagacagtgtctaatttaactcttgaatatccacatgagaggaaactgaggcccatgtaggcaagggggctggcttgggagcctatggcagcagagctcactctcagagaacccaggccaaagcactttgttctgatttgctgttgattgcacacacacatgcatacgctcatgtatgtgagcgtgcacacacacacacacacacacacacacacattcaagcaaaattccctaagcagtaaaatggcaaagatgtgtttgcctctaaagggcagttgcttattttgtcttttctgtgcctgttgcctttgaggcaggagaagggtgggcaaggattcctgctttgccctatataaggaggctgttgtcccagccaggcccatcccctggcaacaggactaaaatggtaacagggagttctgtttaaggccagctctgcacagcagctgcctctcagcccgctgctgatgaagcgttgtctgcccaacacctgcccttcctcctgtaaccagattggaatgcaggcaccagggtcttcctagctctccactggggtctgcagtcatggggtgggtcctgtgagggggccattgccccactgatgtgtgcccttagtgccaccctgccttgggtccaaggccatggggacacacgagacatcttgacgtcaacgggtcagctagattctccataagagacttcccactctgggcctcagtttccttccctgtatagtagaattagagccagctgtggctaaggctccctttcactctgctgttctataattctggcacctatgcctcccttgcagcagctctgaaatgaaaaggtttttgttcttattctagcatagaaattacatgtcatagcttagggcgtcagatttcctgagttccaatctctggacaactacctacttagttgggtgtctctaagggaagttagcaaacctccctgcgcctcaagtttcctcacctgtaaaatggagataaaaaggggacctatctcatgaggtacctgcagctattgtagttaaagcataaggtggggcattggactaagtggctgtcaaggtctttttccacctggggctctgttgttctaaatcccagacgtctagtctcaagctggagaattacctaagagaggacatttcacagctctggaaacctgatctggagattagaggcctggaaaaggcaactgaggagaaaggagcagtggggagtttccagggcaccaaatgcaaatctgagtacaggtgtggatgccatgtctctgccagccagctcctcagggcagaggacgcaggagggcggcagcttctgagcgggatgaggtcacagcatcttgaggcctgggatactgtcacctcagccccattcatctgcagttttttgcagaaccatccttcccatgtctgctgtttggggatgatggtgggggcagggggggatgattatctttttttttcacagtataacagtgattaagtaccctgttttggagtcagacttcccttaacccagctggggaacctcattaggcctcctcagtttcctcctctgtaaattgggaataataccagtcatgaggattgagtgacatgatgcatgtcaagagctcagcccattttcccacataagagaaggctcactaaaatctgaagagtgcctactgtgtgccgaggtgcagcaggaagcatggagaggcttccgttctggtgggggtcgaccagtaacacacatctggacagaactaacaaggccatttcagacagtgatgtagatcatgaagaaaataagacacagccatgcgatggagagtgtgacggagtagggagggtggtggccacttcagagtgagcagtcggtggagtagggggggcctgttggaggaggtgacatttgatctaaacatcagaaagtaaccagccatgcaaaaatggcttgtggatagacactggggcagtgaccagctattgagctccaatgtaaaggatgtcaggatggctgtggcatggtcagtgaggcagaaagtggcagaagaggatgctggcagggtaggcaagggccttataagccacaggtgtttggatttcattctgagtgcaataggagcgtctttggagaattttgagcagtgggtgggtaacatagtcctgatttacatcttttaaagataattttggctactgtgggagagaccaacttggggtggggtgagcaagtgtgggagtgggaggccagctgggcatctgctggaagtctagtaagagatgattgtatgcaccagtatggtggcagcagagagagagagatgagaatggtattttggagagagtgcagacaagactggctgatggatggcatgtgagggcgagggaagagaggaatacttaaattttgctcctcagcagctgggtgaagggtttgccatttactgacctaggagagactgaaggagaaactggtttgggtggaaatagaattccatttggatctaaggaggagatgctgataaaccactcaggtggagatatcaaggaggaaggatttgaaagggctcctttgcaggcatagccgaggacagagttaatgcatggaaggacacggtttgttttgctccgagacagcctgtgtgcatttctaactgcagcttatccctcttccagccctaagcttctggattagcttgaagggcctccctccctcgcccaacagcttggagtgacccacatccctccttgaaccctggacgggctcaaggctgcccaaaatgctcctctgcaggactcctattggcgcataggtggagcttccagccctggtgtgtctgggatcagagcctgggataacctagaccagccagccttaaagaacattgacagtgtgccaggcactgtgttacaatgctttaaacctcacgtttaaggggtctgtgaacttggatggaaaaaaattacatctttgttttcatgaatctctagctgaaatttagcatttcctttatgaatgtaggggacaaaaaaaagtattagtggtaacggtgactttgttgtcaatggaaatcacagatatttgtatatcacagttgttcaagatatctacaaatatttaggctcattgctatttccaaattataagtaattattaggcatgccactagctcttgttatttgttaataaggaaacactaccataacagattctttttttattattttgtaaatatattttgatagtattggttttctttataattctacatttcatttggtgcatttaaaaatgtttcggctgggcgcggtggctcacacctgtaatcccaacaccttgggaggccgaggcgggtgaatcacttgaggtgaggagttcgagaccagcctggccaacatggtgaaaccttgtctctactaaaaatataaaaattagctgggtgtggtggcgtgtgcctgtaatcccagctattagggaggctgaggcaggagaattgcttgaatctgggaggcagaggttgcagtgagccgagattgcaccattgcacccagcctgggcgacagagcaaaactccatccccaccccccgccaaaaaacaattcatttatttttttattttatgcattcataaatgttgtgagaagtttataggcttcatcagatctcagagggacccatggctcaaaaaaggttaaggacccttactttacaagtatgatcttatcattcccattttacagataaaagagctaaggcccagagaggttgagtgtcttggccagggccacacagctggttaagggaccaagcccaaattaatgcacatctttctcattccaaagtcagcgttcagaacagtccaccattgcctccaaagtagccccatcagctaaacctacaactgatttgaatagagtccgcaccacaaaaaaatcatattttgtctgaaaaaattaatccagcatttgcatttctagtctctaacacgcccttgtttttttgttttgtttagttctgtttttataatacaagaatgttcccctttccagttaaatgacttgactttattatggcaaatcttgggggtaaaatggagttctgaaaagaggcaccatgcctcctgtgtatgcctctgagtatgtcttgccactccaggtatgtgatcagagatagagaagcatggcctcagcttagttgattcccgtgctgcctgtgagcagccagtccactgagcaaacgagaaggctgaggcctagggccatggggtggcctgattataatcacatagctccagccaatggagttctagttcacgttcttcccctgttgcaaccttggtatggctcagatgaccagcagactttggtccaattccgactacccctaacttagctgagtgattttgagcacattgcttaccatccctgggactcagtttcctcatctgtagagtggactggacagtctgtctacctgcctttatgtggttgttggacagtataaacaagatgtccataatgtgcttggcacaaaagagaggctcagcaaagggcagtgattcttatgggccaaatattaccaagctctcagaggtccctagcccccaagcaggggctgggtgctgaggaaggcagagacctccttgctgcctgagaggtgagataggacatttgctaagctcccaccaagagccaagtgtgacctggtggtccaaactcagccacagtggagacctcactagatggactgtgaagggtggagaatgggggacagattcctcacctctcatccctgtctgtctgtcccttcctcagaatcccagaacaagaagtggtggctttatttcacacacctctatatttaataagcaggaccatgacgaggtttggtgacctcagggcccaaatggactgtctgctggcataagtggtgcttgagtcatttcccagggatgagcactgggcaggcttccaggagctgaatttaccctctgattctctgctctcctcttctcctccccacccctaagctccattttagagtttccagcttctttggcttcaggaggcatggaccaagatagaaagtaaaatagttattcattcaccagggctctcatgcccttccctgagcaaaggcttaggctcgattgaagggagaccctggaagcccgagacactgaaccaggccctgaggctcctgctgatatgtatgtgcactggggacacaggctcagtgacctaaatgcccagagagagactggaggaaggagaagctggggcattcagggcaggctccatcagggaggtggcatatgaatgggcttttttgtttgtttgtttgcttgttgttgtttttttttttttttttttttgagacgaagtcttgctcttgtcacccaggctggagtgcagtggcacaatctcagctcactgcaacctccgcctcccgggttcaagtgattatcctgcctcagcctcctgaatagctgggactacaggtgtacgccaccacacctggctaatttttgcattttttaaaatagagatggttttgccatgttggccaggttggtctcgaactcctgacctcaggtaattcacccatctcggcctcccaaagtgctgggattacaggtgtgagccattgcgcttggctggaattgggttttgaggaatgagttgcagcatgtatatgataaaaataaaaaccttcaaagagtaaagaaggacataaaatagaaagtaaatattctctgacctctcccatgcctaaccaactccttattcctatttcctccaactcctactattcttgtgtgtccttcttgcaataatctatggatatatgaagtgtacctatctatgcatcataaaaaaagtgtaaacaggatcatgtaacgttaacatccccttccacctaacagcccatcttggcagtcttcccatagcagtgcacgaggggagggatggcttttgaccagtggtgcgaaaacattggtggtcattgcaggtcgctagaaagatatcaccaagaactcagagatgagaaaaactacagtgcgtatggggagctttgataggagtgaggcaggcagtattgccaagcaattacgagcctggtctttggatttggaagatctggggttgaatcccagtttcagcactctctagctgtgtgaccctgggcaaatttcttcacttcaatttccccatgtcttaaatggctaacaatacctccctttgggactgttaggcacttttggtgagagcacttacaactcacagaggcacctggtaaacagcctccgctgtttttgctgctgttgtcatgtgacagatggggcagggggagctgagtcccaacaggtggggccaggtgcatgttgggtgtttcaggagtgacatttggagagaagagggccaaccgattgatctgaagctcaaaatagcctggaagtgcaagaacaacaataaataaatgggttctggatgcttttaaatcttggcatttcctgatctcagctcagctggtccagacagcttcatcagcatttactgctgaggcggcggcacacgcctcccttggccatgacccaaagctgctttcaagaaaatcagatctagaaacgtttggatctctggtgccaggcctatgggtcatggacatatggcgtggatcaggtagtgtcagggtttgtcccatgtgtatggggaatgaagacctaggggatgaggagagagagagcaggaccttgtaggacgagtgggtgatatgggcacaagggaatggccaggctcctaatcccctctccaagtgtttattgagcacttactatgtgccaggtgccagggatacagtagtgagcattaataaaatactcatgcatataaatgtttaataataaatgcttaatttcccagtgtgctcagctccagaagcctctgtaccttcagaaggccatgagagcgtgcagaaaggctccttatatgatctgcaagctcaaaaaaaagtttcctccaggaagtagagtgaaggatgaataggagataagtaggcaaagcctttatgtgtgggaagcgtgttccgggagagggaacagcatgcgcagaggctatgtcaggggacagatcctgtcaagtgccaggggtggaaagaagccagcaggactcagagtggcagtagggagtgggtgctggtgtgaaatgatgtgggacagggaggcaggagacacaccgtgcaggaccttacaggccacagaaagagtttcagtctttacctgggaggaatcagagggagccagtggggtcaggtctgtgtcttgagaagatagctgtggctgctctgtgtctagccgcctggtgggggctggagtagaggcaggaggctatggctgccattgacgtgtgagttggtggtgtgaactgggtctgtctcagagcatgaagggttaactcagtgactgggtgtgaggaagctacaggaaggcccagcaacccagagaggctgcagctgtagttgcttaaggactcttgtgtagtaatctcactgatggccattgtcttttgagtatctactttgcactagacactatgtgaagcccttctcgttaatcctcataagaaccctaagcaggtgggtgtaccctattttactgagacccggagaagttaaatcatttggccaagattacacagctcagcaccgccccgtccctgacccccgagctcctctggttgacggtcctctggataagtgttctccagttcactttgacccttctcaggacttggcccaaggccccagcttctgtctggttgctccagtgaccctcagtgtagtgtctgccctgacctcaggaaccagttcagagctggtctggaagagcattgtcctacacggtctgaaaggacacagccatgtggccctcgctcctccgtccctcctggcttgctggcttctggcagcactcaatttgcgacgtgagctgaaccggttgtgtctctgggctttgcatgttgcctgcctcccgggattcagatggtctctgctgcttgtttttatttttcttcttgacttcctctcctctcctcctttccctctgctcccaccctgtccccatctgttgtggccccatgggggtcttttcctcccctcccagatgtgcaggcaggatttgggatggaggcagaagcctccttccttctggcttctcgagaaggaaggaagctaacagtttggacagctgttacctgccgggctctgggctaggcttttggcatacgtgatcacacagagccctcatgacacttctgtgaggcatacacagctttatctctacagatggggcagctggggctgggaggactcaggtgttgcatccatggtcacatgataaggatctgactcgatttaaaatttttggcttcccaaacttaaatgtgcctatgaatcacctgagtattttgttaaaatgcagattctgattcaggaggtctgggatgagtgtgaagggctgcggtatttaataagctccaggagaggctgatgctgctagttcatggaccacaacatgagtagcatagggaggagccagcagagctcccacttgccacttaagggattctcccacttgagggttcaccagccctcaatccacaccacctccaccccctccactgtctttcctcctttttaggaattgctgatggggcacctgacacttttccaccctgcccacgtgctgaccctgcatgtctcagggccctggttgtctgctctctgaggttgaccagtgctggaatatgggggactgaggctcagagaagtagagggacttgtcccaaatctcatactattagcacagaggattcaggttgtgactccccatccagtgttctctactattgcttccactaggactcagaggtcttgagattctagtcctggtcctgtctttgacttgctctgtgactttaggcagctcactttccctctctgaacctcagctttcctgtttgaaaaatggcttaacctctgccctgttgtgagtgtcaaatgggagaatatctaatttacagcataaaggatttttatgagccctgagacccaccagtcctagtagagtgggagaaacctagtagggcaggaaagtgggttctcgtggtacttacatgtgcgtatggcaggggcttcatttgacaaaacacctccttgttctgtcattgagagagttcctcgcctcctgcctgtttctcttagtcctgggtggcaatcaagcatctgattttccccctttcctagttcaggtgcctgttattctgtcattagcacacagtaaggaggcccaggggtggggagcctgctgcagtgccacccccaccccaggacacatccctattacttgagaagaagggagtgtggaaacgtgtgattcagttgacacagattcattgtactcgcccagttcttcgctctggaacgcacttctacataaggcaggctcagctgtggcttaggaggccagccagagcctcgagtctgcaggacctgagcgagtggtggtctgctcagcaggcctccttggcttcccttggcctctggccctcactgaccacatgaccaaggagagcctgctggggccaaagagaacctctttcccaccagctttatctgggagcctgtgggtctgcgtttctcatcatctgacccactggaaaaggaaaggcaggagtttccataagggaataaatggatgcggaaggaaaccacccctcaacccccggtaaaggggggttagtgtgagagagactgcagccttcacgatagtgtgaggcagagatgccaaaactgtcctgggaaatagtgcctctgcgcctccaccccacaccctcccgtcctgcaaaggtttagtaagcacctactcagtgcttggcacctttccaggtgctgggactcagcaaaggacaaggccaggtgcttggacagtttatattctggagaggagacggatggtccctggttccatgctatgcttaaaacacagtgatgcggccgggtgcggtggctcacacctataatcccagcactttgcgaggctgaggtgggtagatcacttgaggtcaggagcttgaaaccagcctggccaacatggcgaaaccccatctctaccaaaaatacaaaaattagccaggtggtggagcatgcctgtagtcccagctactcgggacgctgaagcaggagaatcgcttgaacccaggagacagattgcagtgaggtgagctcacaccgctgcactccagctggggcgacagagtgagacgctgtctcaaaaaaacaaaaacaaaaacccacagtgatgtaatccccgtgagtggaaggattggagtgttggggaaggcctctctcactgcgactgaacagtgggaaggtggccccaggacctgggggaggtgtcccaggtggacagccccagacagagggttgtgttccatgggaaggaagaaggccaccatgcctactgtatagggagggtgggagagtccaggaggtggtgagaaagcaggcaggctccagctgcactcggcccctgaggactccgggttttagtcaagggcaatgagaagtcaggggagggttttcagcaggagagtgagcgatgagccctggtatccgctctgcctccagctcgctgggcatggtgggcaagccctgcccctcttgatgggagcttcctccttcgtgatgttgcctgggcttctggaacccaggaagactctcaaaggtactaacaggtgtggagaactttcccctccccattctttcaaagtcacatagataacatggggaatgcccactttgctggattctcacaggctgctcagacaccctgagtggtaaataccatggacttggggagtggtttcttagtctggggtttgggtcaaattaactatcatagggtccttaaatagcctacaaagtagtgtatatggaaaataggtacgtgtatatgagtttatgcaaatagagaattcacatgcaagatacatcaccctacttctaatgtgtaagaaagaaatagaaatatggctatttatttatttatttgtttttttgagacggagtctcactgtgtcccccaggctggagtgcagtggcatgatctcggctcactgcaacctctgcctcccgggttcaagcgattcacctgcctctgcctcccgaatagctgggattacaggcgtgcaccaccacgcctggctaatttttgtatttttagtagagatggggttttgccatgttggccaggctggtctcgaactcctgacctcaggtgatctgacccacccaccttggtgctgggattacaggtgtaagccactgcgcctggcctatttatcttttttgccaatcacataatgttaaattcactctggttaaataggaatatgatgggttgccactatatgacttttggttaataaacatgggaaacctaattaactctttcataattcctcccatttcaaagcccagggccatggtggagctgtgggggttccccagggagcccagtgtgggaaccacaggaccagatgggctgtgaggcccctccagctcccacgctgtgcagcagcaggggcagctgtgggccgagcactgctgagtcatctctccctcggcctggtcatgtgttggctgacaagcccaggctggtgtggagtcctggcctgggttattggggaactgacttcagctctggcctgccgaggcccccagcctactgggaagggggaatcgccagctacctactgcctgtccacccacctgagggtcccctgtctgttcataaaccccaggagccggccacctgagagggctgcatatcctgggtgtgtgagtgctgcctgggggctctggcatgacagcaaggcggcagtcagctccaggcagcactgggctgaaggtgtgcactggcatcttgctgccctgttgagcatgacatttccttaaatgccatgaaggggctgcctgaccttcactctcttgccaggaccccctttctacctctttctgggttatttataacagtgtttacaagaaaaagggcttctcagctgagccctggccctgctccctcggtctctcctgccagccagggcaggagatgcggaaatagaaccagagaacgtggacactataggaccccagaaaacacctccagatggagtgtgtgggacactttgtttttttaggtctctgggacttttttttttttttttttgagacagtttcgctgttgtcgcccaggctggagtgcaatggtgtgatctcggctcactgcaacctccgcctcctgggttccagcgattctcccgcctcagcctctcgagtagctgggattataggcacccaccaccatgcccagctaatttttgtatttttagtagagacggggtttcaccatattggtcagctgctctcgaactcctgtcctcaggccgtccacccaccctggcctcgtaaagtgctggaattataggcttgagccactgtgcctggccaactttttaaaaaaaattgtggtaaaatgtacctaacataaaatttaccctttttttttttcctttttgagacagggtcttgctctgtcatctaggctagagtagtgcagtggtaccatcacagctcactgcagcctcaacttcctgggatcaggtgatccttccacctcagactccagagtagttgggacaataggcatacgctactgtgcctggccaatttttgtattttttttttttttagagacagggttttgccacgttgctcagactaaaatttaccatttataaagtacaaaacagtggcattaagtccattcaccatgtcataaaactatcagcagtccagcacttttctgtcctcccaaagtcaggtactttgtcatcctcctgacacaggaggatggctggcatgtccctaggcacatctgaattttgaggaaatcccacacaacatggcaaggaaaggaagcacctgccagctcatgagcagggtgtcagtggtcgccccttcagccgtgtgacatgagcaacagtcaccctttgctttccttccgactcaggaccaaggtcagaattccagcgagtagactgccagaggacatcctgattgcaggaagaaccaggaatctgctccagtctctttcttttcttaagcaaaatcgatgcatttcactaacttcactcctttcattagaaatagggcacgtgttttgtaactcacctcaaagctgaatgccaccccccatcctggcaggccattcaccatctttgagaagaatttaataacagttcctggagagtttcttataagcattttacagttttcctaaatacctcatgagggctggagcaattccacagcaactaggaggttatgggccccattgcagagatgttgaaactgaggccccactaaatggcgtgacccgagacatggtcccattttagtcacctgcatgaacagtaactttctccatctaatcccgcccaggtgagggctaaggtaaggcaaaggaggcacttggctctggcacaaaatttaaggagatgctaaaaaactcagtcgtcaagatcaatcctatttatatcagtgtttaaaaaataattgatataaatatccatgctgaacaaaatatccaattttaaaacaaaggcagaaacagcaacggggccatgcgtagccctacaggaaccgaggcaagagggaaaaaattggcaccactgacctcacctttacttagaattttggtattttgttaatcttgggtggatattttgcattaattttaaaattgcattaaaatatgatctaccttgatgactgagtattttgatgtgtaaggcaccctaattccagccccagctccacctcccaatttctgtgaactactggaacagctgacccctgccttcaggtccccaggccctggggtccttggatgccagggcctttcactcctgagagtcaagagagcagctgaggatggcatttgatccctgcagtctatttttgtgcctgcccttcagcaactgataaaatgttgctctcggtagagctgatgtgttgaaatggtgagtgttgatgtcaggtggtttgtgtgatcatgtatcttcattcttgaccttgtagaggggcctggaaccaggaaagaaactgaactctcagcgtttttgccccccacagactttgacaaaacctgaaattgttatctggtgactgaggctgccaggaagcttggtcttgtcttggggctgtgtggaaaaaatgcacatgttgcgctctcttgtttttgtacacggtcctataccctttacaagacactcattttgtttcttgaacgcatgtttattgagcacctactatgtgccaggcattatgctgggcatttgggatacagtgggcaacaaggcaaacccagacacagcccctgctcacatggagctgccagttgtgggaggcagcagtaaacaagtagataaattagtaatgggggtagttctggagatggatggtggtgatggctgcatagcaatgtgggtgtacttaatgccactgaactgcacacttaaaaatgtttaaaatgggccaggcatggtggctcatgcctataatcctagcactttgggagaccaaggcaggaggactgcttgagcccaggagtttgagaccggcctggacaacacagaaagacccctatctccaccttagatagatagatagatagatagatagatagatagatagatagatagatccatctctaccatagatagatagatagatagatagatagatagatagatagatagatccatctctaccatagatagatagatagatagatagatagatagatagatagatagatccatctctaccatagatagatagatagatagatagatagatagatagatagatagatagatccatctctaccatagatagatagatagatagatagatagatagatagatagatccatctctaccatagatagatagatagatagatagatccatctctaccatagatagatagatagatagatagatccatctctaccatagatagatagatagatagatagatagatagatagatagatagatagataagcaagcaagcaagctgggagtggtggtgtgcacctgtagtcctagctactaaggaggctgaggcgggaggattgcttgagcccgggaattcaaggctgcaatcagccatgatcatgttactgcactccagctcgggcgacagagtgagatcctttcttaaaaaaaaaaaaaaaaaaaaaaaaaaattaatcaatttcatgttatttatattttaccacaatttaaaaacatactgataaaaggaggcaggggatagcagagaatgataagtgctaatcgagggaattccagcagggtgctaggtaggccagagacgggatggccatttggggtgcagtggtcagggaggcccatctggggagggacgttcaacctgggatgaggatagaaagaagggagccgctatgggagatgaaggagagagaaggcgttccaggctgaggaaggctccagcacagaggccccggggtggacactcaagccacacaactgttccaggagggaggctggtcttgagagatgcggagagggcaagcaactccctgtaactagcaagttatgagccagggccagccctgcctcaacaaagcctaacaacatgtacctgtacatcattttacagtttagcaagtgctttcctgccactctcctttgaattcaagaggcccttgagttcaagtgcataaaattgactgtgagtgcaggcagacacaatgtgtatattaccctgccttaaaacaccttgcgcagaatatacttcaaccttattgtttacaaacaaaatgaaacactgccttcctgggcctggggcaggcttgtacctgctgataggccaccctcctgacaggtgccaggatccatgctgccgaaggtggggtggggggcctagctgacctcggtgctgaaggaggggagtctgggctctgcacagccacctgccaggccatccaggagctgcctcaccccaggtcatctcaccccgacacagcaacgagagactttgcagatcttcagtggataaggggctgcttgcaggcaataggagtgggtaaggagatgactgtaagataacacctacccaggagactgcctgttctctctttcccttatcatttaaagagagatggatctaatgtagaacttttggtggatgggccacagatgttgagaaagtggcctgtctggaaactggtctggacaggtcacacgggagatcccggtttgtgttccggccctgggaggagctggctgtgtggatctcgggtgactccctcttcccgctttctcagcctcaatgtcttaatttgcaaattgagagattcattcacaaaaagtgttactccagacccttccggtacacaaaaccttggttctgtgttatggtagtccatcataagactttatttcctgtgtcatgggggccagagcctgtgtgcagtagtcaccttcttatctaatgagagtggaaactacggctgggaggtgcagggaggctgcagaggggaattcctaggaaaaagtcagataaagcgcaaaattgtgaaacacatgcctacgttgtcttttagcgaagccatatgacatgtatattcatttttgccagtcttttgctataggactgtttgtggtgccagcattgaaaccgcaagtcatcttccctccatagtccacacccacagtgccagggttctagtttccagtttcaggatgcattcagctggatcaagaactttgactcttgtcaagcagtctgagtgctgaatctttcttgattcttgcaaatttctcataatcttttaccatgaactcattcacatgaaatttgatggcagtgttgtttgctttttagcagctcaactttattgaatccttccacagccttcaacttagttttcattgaaatctcgtcttttgtactcatattttctgtttacggaccagttagtgaaattttgtaattacactatcgagtgggtttgggaagaaacagctgaatcttagtaaataaacaactaagtcggtgggagcagaccagctgaggctctcaggcaccttaggcattagtaaagggtgttattacaggagagggtggggagtgttggttaaccaagttggttggtcaagtagaggctggttaggaaagcccctgttataccaaaggcctgagatggcctggatgggattagctttggctgcaagtagcagaaaactccctccaaatgataagaagtttgatgagctctgagttgagtcctctctcagatcctgagataggtgtcccagggcagtgtcagggatcctggctttctccatcctgttgccctgcctaccaggcagagctgccttggtccctggaaactgggcttcttactggttggctgggtctggcccagccttggagctcagttctgagcactggaccccatcttcttctctggactggaagatccactcccgccagacctggtgacctcctgtggggtcgccttactccaagccctgaccaggtacctacttggctaaggcttggagcccggctgtgaagggctgagaatcaccaaggttgagctctgcaagcctgaacccggatgcttccgcacagaaagggccttggatgctgggttgagatcttttgccttaaatgttttggtgggaggcccttccaatggtctggtttatctctgagtttaagatgttctgttcttctaggctgggctcagagcccctctcttctgtctacttattttgtctggagtttaactttgtgtttgtggctttgagtctgatttcagatgatgctgtaggtatttctgtggggactaagataaactactctccccactcttctcctggaagcttctttaggtgatttgtattaatttggaagacatggaaagattgggtttttttcataaggtaagagagatgaataagttatcactttttcattgatgggtgatagaaactccaagtggcatgtaatctagagagggaacgtattcactcccataactggagcacagggaatgcctgccttcaggcacagctgaatccaagtgctttagttattttattgggaatctatctctgtctgtttcttggatctgccgtccctgctctggcttctttctcaggcaggccctttgcaggtagtggcaaagagggctgccagcctattcagaacagaatccagccagcgcagcccccttgtccaaatgctcctgcagtttcctggtatttgccatgacccacccaatccaaccagttgttgtagccataggatactttaattggcccggatgtgcttccctggattgcctgggggtaagggaaggtcagcttcccagaggaaactcggtgggcttccacccactgggaggggaatgggtaagaggcaggccaaataacagaggtgagagaaggaacaaaacatttataaagtgaaatggctatgtgggacttcataggtatttcccacacttccttcctagaaggtaagtagaggcgcagggtcataatgtagagtaggccccttctaatcaattagtaacagctgctgaggctctgtgttgagaaggtttggggcttagcagggtgtcgggctgggatcagttagtggtatcgccatggaaagagggaacagtgagcccagtgctgtgcgcttgtcaccctagcagatctcattgcaggtctgcattcctgacagcagtttaagaagaataacttgcctcagatcatcaaatacaacttcttatcagtgaaggaggcaccaagctggcagtcgggcaggacttaggatatccaagatggcagtcacaggaggtcagtgcagccgggtggagcccagactccccaccatcccaggccgacctgaagagagccagcatggtctggctggcagggcaagatcattcccccaacagaaaccacaagccatgatgacactgggattaggtggctggtcaaagttgacagaaaagaattgggtgagccggcaggtttagaactgaggatatgggtcaggggatgagttcacgaagcattgaccctcctagagccccagtgttcccatcagtcaaatgggaatgctgaccactggccatccgctgcaccttgggaaggtactgatgagagcacagctgtgaatgtcacttgggaactagaaagtgctatatctgtgtctcagtctgtttctgcttctgtaacaacataccataaactgggtggcttatacacaacagaactttatttctcacagttctggaggctgggaagcctaagatcgaggcaccggcagattttgtatctggtgaggacgcatttcctggttcgtagattgcagcttcttgtattctcacagggtgggaggggcaaccgagcttacttgggtctgttttataagggtacgcatcccattcatgacctcatcacctcccagaggcctcgcctcctcatggcctcaccatgggggtaaggatttcaacataaatttgcgggatcacaaacattcagaccgtagtaatctgtgaccaccactcatggatgtctgatccatgccatgttcccaacctgtggtactttatctttgtaagaaccctaggaggcaggattgtttttattatccccattttgtgactagaaacctaggtggcaagaaacaatgtcctgatctgaaaggatcagtgttaaccgcaaagccagtgcccttttgcctcccttgtctaggcttccttccatctcaagacagtccttctttctgcacttttctcccctctggaaagtcattcacacgtatattcctttatttgttcattaaatgctgagttctgcgtgtttcccccctatgtggatctcagaaatttgataagtacagaattgtatcaaatgcttgagcagggtgttctccagagggcctgtctggttttatgttctcttttccagaggggtcagtgaggaccagaggggggaggtgacccaatgaaggacgcatagtgagtactgacagacccagaacccaagctgtcactgcagccacccctccgccccacctcctccagcttccttccactcagtagttctgagaatctgctctggaccaggcactaagctaggtgatttgctgattatagccaggaaagtagagccaccaatttttcctgaagatgcattctttcttaagcagggaatcaatttccagcaagatcacaagcttccaatgaagccacttatgtgagtctggaggaaaccccattaatccacggccagggttatttatctccctggcttggggcagccacagtcctttcagatgagcgatgtggtgttgctggagaaggggggcccacggcagggggtgagcaggcacgttgaggggccagagaggccctacacacgggccgtacaaacagtgtgtttggtcccaggtctgtccttgctcagccacaaacttgctgtatgacttgggccattcccaacccttgcctgaagctccatttccccacctgcagatgggaatgaatggtcttgaatgttccttctcactttcggaagcaggatggtgaatgaggatcctggcttcacagggagagaagagacttgggtttgaatccaagcttcacccttttgggaccctgggtgttatgggttgaattgtatcctctcaaaaaaggtgtgctgaagccctaaacccccagtgcctcagaatgtgacctccttggagctagggtcttcacagagataatcaagttaaaatgaggtcattagggtgggccctcatccagtatggctagtgtccttatcaaaaggggcaattggggcacagagacagatatgcatagagggaagaaaacatgaaaaaacaaggagaaaatggtcatgtacaagccaaggagaaaggcctggaacagactctcagaaggaaccattcctgcagacaccctaatctcagacttctgttgtttaagctaccacccagttgtggtcctttgttatggaagccctagcaacctaatttatttatttatttacttacttacaatttatttatttattcgagactgagtcttgctctgtcgcccaggctggagtgcagtggcgtgatctctgctcactgcaatctttgccatccatgcctcagcctcctgagtagctgggattacaggcacccgccgccatacctagctcatttttgtatttttagtagaaatgcagttttaccatgttggccaggctggtctcaaactcctgacttcaagtgatctgcccgcctcggcctcccaaagtgctgggattacaggtgtgagccaccgcgcctgttcctagcaacctaatttaaatgacttgccgacatggggacggtagcacccaccctgctgggttgatttaagactgatgagagcatgtatagaaggcacttagcatgggccttggcatccagtaagggctccataatagcagcggctgttagtttgtgcttcaacctcccagctccactggcagggcctgtggaagcctcccgggacaggacaagaaggccttaattcagacctttcaaaaagaactgggccacttgaagcactccttcaaaagcctctctaaatatggagatggccagagaaatcactattaatgtggcgcttaatggtttttagctagagagtggtcttagcctaattgacaaggccgcgaagctgaggtttctttgtttttatgtgctgggtacactttgagtatgttgagctgctatgggcaatcaataagtgtagtcatcacagccattttatggacattttgtaaaggaggcggtatggtttcgagggaaggacactcaccggatgaccccgaacaaatccattatcctctttgggtctcagtttccatatttgcaaagtgaaggagatagaccagctaggttgggagttcttaagctagttctatgaagttctaaaagttaagtgtacattttgtgcacatacctgcatcttctggggaaaaatgtacatagcttttgtctggtttttgaagggacctctgcctcccagattgttcaccatgacttacctggacaactctcagagctgcgggttcctggctagtctgggattctgggactctggttctaaagctgtttctaagaagcaaggcctacaaaggtggctgctctgagttactggagagagggagatctggaacatagagctcacccaagatcttattgctgggggctttgctggcctcggaggccccagctgcctagcaacccgtgtctctgcttttggccctcccttgtgtcccacagtccctagatggtgtctgagaggtacctccccaacccaccacctgtcccctcctggatggctacaacagctgttaaaccatctccctgcttctatgctggtcctacccccatcacacttggggtaaaacccaaatcctttccaatcccttcctgatccagcctccaccagcctttctagtgtcatcttttcccatttcctccatcccccacccctggtcaccaagctgcagcctcactgacctcaacgccttgtgccttgggctcagtccccacgggggtctttgcctctgactgtccctctgcctgcaatgctcttcccacctcttccactacctggcttctccttcaagaagtttttcctgacattccatctgatttagattctgggctgggcacagtggctgacacctgtaatcccagcactttgtggggctgaggtgggatgagacaagcctgggcaacatagagagacccctgtctgtacaaaaaattaaaaaagaaaaattagccaggtgtggtggtgcacacctgtactctcagctacttaggaggctgaggttgaaggattgcttgaacttaaggggttgaggctacagtgagtcgtgatcaagccatgttgtattctagcctgggcaacagagcaggatcctgtctctaaacacaaagagcgtgaaaagatagattttgtttcctgttatcttccatcagtgcaccttgtttgtttctccttcatagcactaactcagtctagaatgaaatatttacatgttttcttccctcactaagatgtcaactcacggaggaaggagctgagtcttatataacacagtgcctggctcatagtagcattgaacatgcccactagaatggctaaaataaagtgactgacaataccaagtgttggagagggtgcagaagaattgaactcatacagctgatgggagtgtacaaagtgagtgttctctcattgtggaaaacagttttctgttttataaacttacacacatgcttaccatatggcccaacagtttcactcgtaggtatttacccaagagaagtaaagacatatgtccaaacaagacttgtatgcaagtattgcagacttactagaaatggcccaaaacaggaaacaaaccaattatccatgtagaacaggaccacggctgcatccccacagtctgcttgggcacgaaggagaaagaagctcccaagaggcagctgagagaatccacctgagttcccgcagcaggggcagccactgagtgctggtgatttgtagttggggggcatgacagttgggcttgtggggagagcggtacctgggggacccagagattgaggaagcacctgtgtccctctcatcttcagattcccaatcaggttcagaagtgttctgctcttctctggagagtcatgatttagaattacatgttttgtttgtgtgattatttgtttaatgtcatccttccccacccaccatcacagtgcctggctcagagtgagtgggctctcaataatgaggattgtggaatacatgtggattggagaaagaatgggcaggtggtgggcagggtggtggggccatgctcccagagacagacttgctgggcaccttgctgcctgcttgaggacaggggaccggccgcttgagaggacctgggcctgttgccgcctgtgtaggcaggattcttgcaaaatgccaattaagacatttgacccaaatttggataaaagcctttttcctgtgtcaagttgagctaataatatacatttattcataatttatgaggcctagtaagtgggaacaattaagggaaaggtctggggaaaacctgtttctcttaagtgtcacatatgcctctttttgttctctgagaagttcccgctcctctctgcctaccatgaaataccattgttttatcattattattatcattatttgttatattactcttagctgacatttattgagcagttactaggccgggctataatgacattgcctcttttaatcttaacatataaggcagatattgttgttgtccacgttttacagatgaagggacttgcccaaagtccacaactggtgaatggggatctcaactcacttctgccaggccccagggccaacagaacatcaccaagccattctgtttctgtgtcagccccccaactcaggctatttctgaatctgtagggcagttcttctattggtaaccattaaactggggagaccagggtgagaaattgattggcttctgattcagtagctctgggtttaggcctgagaatttatattatttccaacataccaggtttccaggtgattctggtgctgcccgtctgggactacactttgagaaccactgattcaggcaatgctgttatcagagtcacctgtggctcccttctcccctactcactgctgttaggtgggtttatgaccgtctagatcttttcctgtgtgtttgcatacatgctatcctacatagagaaatatatggcttgatttttactttctttacacatgtggggttatattttacatgctggtattctacaacttttttatttaatgtgtcttggagaacacacagatcttcctcattcttttcaacagcactgtagtatttcatgatatgggtgtttgtttgtttgtttgtttttgtttttttttgtttgtttttcgtttttttgagacagtttccatctgtcacccaggctggagtgcagtggctcgatctcagctcactgcaacgtccgcctcccgggctcaagtgattctcatgcctcagtctcccaagttactgagattacaggcatgcgccaccacccctggctaatttgtgtatttttagtaaagacgggctttcgccatgttggccaggctggtcttgaacccctgacctcgaatgatccgcccaccttggcctctcaaattgttgggattacaggcatgagccaccatgcccggcccgtgatacgggtgttttatggctttatttacatattgtctattgattggtgttccatcatatatcatatatgtaattttatgttcatcatatatgttccatcgtatattacatcatatatgtaattttagacattacatatattcctataaaattcctgggaacatgaatgggtgtttctccagaacctagcagtcacacaatactgtcagtcattattattgctgttttttgtttcattattaatatagaggcattgttagctttaagaagtccacttataagtggggacatatgtgtaaaggattagctcctctatttacagtctttaataaagttttcaacaaaacagttctggtaacaggaggacagagatgtatgtgggcagggccttgagggatatgtaggagtgcagaggggagagcagcagggggttttgtactgctggggcctagcttagctaccagaagattcaaccaaggggtgaagctgatctttccatttcttggtcatttggcaaaatcgggccttggccacgggtccagattagctgcatcattattgagagggcccctgcttgggtctagccagcctcagctctgatccacctctttccttcctgtctcctcagggtggagggtccggggaggagcaactctatgctgactttccagaacttgacctctcccagctggatgccagcgactttgactcggccacctgctttggggagctgcagtggtgcccagagaactcagagactgaacccaaccagtacagccccgatgactccgagctcttccaggtatgccctttccagtctcccctcctcccaccctgccaggcctctctctcctcaaaatcccggctctgccctgctctgccttctcctgcacttgctcatgcagagaaatcccctcacccaccaaagctgttgggccccggtttctcgtgctggatgggcccctgatctggcgcagcgcacatgcctcacctggcccttgctgtgtcacctccagaaagtaagggtgagatgaactgctctctaggcctcccgagcagaaccaagccccttcgtgtgccacagaggtccaagtcctctgttccctacattatctcatccagtcttcgtccccaccctgcaagacagggtccagtattttcccattttacagataaggaaaatgaggcttggaaaagttaagtcatgtgcctagggcaattaacctagtcagaagttgaactggattcaaacccagtcttcttgcctccagagccgggactttacgaccatgatgataccataatgagatgactggcatttattgagcagctgttctgtgggagagctgtccctgtttgtgtatattaattcatttaaatttcttaacaactctcagttgtaaatacaattatctccctttttcagctggagcctagaggttctttaataagagggagtgccaagaaccactattatgcatgtgcctctcccagccctgtgtgctccagcgcccagcctcaggggcatgtaatggctagcatttcctgtaagaaggcctcttacggaataatatgatgtctggggtttgcttcagaagaaagcaagctctgcatggatttgcatgtgtgggtgggagtgtgcggcctagagggtaatcgatgaaattggattggccgtatttagctgggtgatggacacattcagattcatgattcttttcttggaattttctccctcataaagattgggggcagaagccatagctccctgtgcctgtctggcagtataataataataacaaccacaataacatcgcgtgtgctgaacaccaaggtggtgtgccgcaagcgtcctctccaagcgtcctcctcatggattttatcatccttttagaaacgtttaccaagccccctatgtgtcaggcactgtgttcatccgaggactttaccgtctgtaaacatgtgaacaaacagcagtcacttgtgataagggcagaaaggaaatagagaagggactgtggactgagtggtcgggaaaggcctctctgaggaagagaagctatcagttgtgtactcctaataatcgattttacagacaaggaaagggaagctcagaaaggctgagtaactcgcccaaggtcaaacagctagtaaggatccaggcaaagactgtaatctaggaacccacacccctcaccgctacactgaacccctttgccaaccctgtgaggaattaccagaaccaaactgtagttctggctccaaccggagacctccattttcttgcttgaacaatggggacaattcctttgctatattgttcctttcctcttagggggccaactccagaaaatgcttttaggttgcagagaactcatgagtgaaaaggggtttggatgctccctgaaaaccatccccactgagactgtataggccccccacctactcagaaaatggccagacccaccagtaagcttctgatgaggtcctactaatgctttcaggcacaagtaagcttggtgcggccccagtcctgcaaggaagacagtcctcacagctggctgagctctgccctcccagcccctctccctttcatgggctgcacactccaccagctctcctgagactagactagctctatccattgctcaccgatgcaccctctgtgcatgtgactggggcctgtccccagcccctgctccctgcccatcggaaactctgagtgtgggctgtgtctgcattgtgcatggttgtattcccagggctgtgcacagtgcctggcactttgtcagggcttaacagtcatccactgaatgaatccttcgacacgcagctctcctgatgcctcctcctaaggcagttggtcacttagtccctctcatgggctcccatctcttgcacgcatgtgtgtccttcagactgcaaggtccttggggacaaacaacactttattcatctctgggggcccttgcacattgtaaggactcaattcataggtgttgaatgaaggaactgattaaactgacccattccaaaaaccttgagctgggatctaggagccataggttctagtcccccttctggcactaacttggacagtttcttcatgggaccaatgggaatcacggagtcttgctgccagtgccaagctgtgttaacaattaaatggcaccattgttatggaaacaaactgggagagtagagaacaagctacagttgcaagggttgacacttcctcagggacagggacgttgccttccatttctcttccatttctgggactcttgtcccagagtccttagggttggggcatgacaagcccttagtaaatatttctagagtaaggcaggtattttgttgttttgtgacaatttgccatgtgtccttggatgagtagctccctttggttgggcctcagttttcccatgtgaggaatgaggaaggggcgtggacaaatcaatctgttgaggccgcaggaggagagtcactgagtctggacctactcccagaaaaataggagagggagtggccaatttcctgggtttcttgaacctcaatttaagccccatggatagtagcgatctctgatattctttctgccctggtagcctacattctgttccgtgatgtttcttcaagccactctaggtcctcaaaatgaagccttttccctcagatttcttgaaggctcgttttcctcctgcttgagatcagctcaggaagactgggggtggggctgagtctattaatatcccttcctcagctgattaactctccattaatttgcactctgtttctgtgctgagcagggagagccgagctaatgggcctggggaagaggagaggggtggcacagctccctgggatggatggctggaggaagcagtggccagcgtgggcagggatggctgctcctcccagtcaggctcagagcttcctgccccacctggctgtttcagtggagtagggtggggagaggtcgggagaaggagaagacttttggttttacccaaattgatgggtgcttcttgaggtcttcgccattttggactcatttcagcaccgtgaccggcactcagtaagtcagtgttggctctctaagtcctgggttctagtccttagtcctacccctgactcactgtgtgaccttgaaaggtctctttcctggggctttattcctcccctgccaccacgccccccaaaaataatggcagatagatttccttgtgagtgccaactgtgattgattggcagttgtcacctgaagccctgcatcagggaaaatgctggcatggaaggaagcagctgttagcaatacaggggagcagtagcgtgtgcgccacgcatttgaaatctctcttcactacatggttcctgagagcccttccggctctgatatttgtgataattcacaatatctctgggcccttggtactctccctgggaaagagtgagaattctcagttcgtgcagtgctgatgatgtcatctctgaatgacttccctctagaatctgctctttgagacactgaacttagcctcccgccattgttcattgtttggttcattcactctttcattaagtaaatctgccgtggtgcctcccatgtcccaggcattgagcttagggacctaagcactctacaaagcactctcattactgcttccagacttggccttctgggagcccagggaggaaggctggccagggatcatgtcttcccatttcacagggaaaggagcaaggcatagaggagggaaacgacttgcctaagatcacccttttgatggcagaaccccaagagtggtcgctgaggcccaagttccaggatcttaactctccatcaagctggacagatggttctgggctggacagggttgggagtctggcctgagggttgaaggagacttgtgggtagggggtgggggcagccaatgagcccgcttgcattctaaagccagagtcctcggaccctgatctaccctcgggcctccatccccagggcctgggtcaggcccaaccaaaatcttcttttgacctttcttttattcttagctctgttctaaaaattacaaacgcgtttgttctctccccgtgttcccccttcgaactactcagctgctgctccggctgtaaggcctggaacagatttagtgcagccaaaaggccgtcacgagacgtgtatttcagatgaacttcctgcagaaaggataaacagcctgacctgggatgggaaagagtgccggaggaggcatcatgtgacagaatgtgccttctgccagaacagcccggggaccaggccttactaaatgaggcgctcggtgcctcacctagaagccacgtgctctccacaccaggcctctgggcgtgggggcctgtgggctgggggaacacacgccgaccctccttatggttcatctgtgcatggggcactcttgctgtccaagtcctggctttggacgttatttgctatgtgacccctgacaagttgctgagcctccaggagcctctgtgtcctcaactgcaaaatggagatcagaatcgtgcgcccctgggcgaggttgctgtgaggcctccctgagcctgacagagcctttctactcctctcttcagccaagcgctgtgcctctggcctttgattggggtttccctcttcctgggtctcccctccttaacgctttacctggctggtgtctttcaagcctacctttaagtatcagctgctcagagaaggcatctgggaccaccctcaagagcctgtaagtcctcaccacattctttttctccatcatggcttccttttattttcttcctagcctttctcacgctctgaaatgatcttgtttgtttgttagtttcgtcccatcctccacaggagggtaagctccatgggagcggggcatgtcattctccacgtgctgtttatcaccagcgtccagcatgaagccaggcacagagtagccaccgggaaggggaaggaagggagcaaagagtgcagggggcagttatactaccaccgccaccactgtcatcatcatcatcgtcatggcagaaatcgtgtaacagtagcagcactagcagtggtagtggtagtagttacagtcatcacagtagcaagtgcttttattttgtgccaggcaccattttctaagcatcttacctaagtttactcatctagtcctcagcagtaaccttaggaaatgtgtgctgtgtgttatcccacttgatagatgagaaagctaacttgcctgagagcccagaggtgctaagtatgggacctggggtacagccccagctccagagcccgagtgtctaatcaccatagttgctacctcctcaggagtgaatgaggagagtaagctctgggaacccgcagagaaattatagctgcctcgtcactgctgtggttattattgtcatggttgaaccctggagcttctggccttcactctgcctggaccccagggtctgaggggctgtaacgggttgctgctaccagtgtggtaggccagcctctgtccttggtgggggaggtaggcgtcactcaggtggacagccctgtgcccaggtatgtgataagcagcagagcccagagtgggactcccaggcagggccctttccattgtcatctactgcctgttcataaaattctgggattcttggagtcaataacacatttattgggcatctgctatgccaggaatactgagcagctctgctgggtgggcagaggggagggtatggcaggagggtgttggtgggccagctggctgggcagagctggtgtccaccgtggagactgagtctaaggtggtgactaaccatctccccatctgcctttctgaccctcccgccctcctcactccagattgacagtgagaatgaggccctcctggcagagctcaccaagaccctggatgacatccctgaagatgacgtgggtctggctgccttcccagccctggatggtggagacgctctatcatgcacctcagcttcgcctgccccctcatctgcaccccccagccctgccccggagaagccctcggccccagcccctgaggtggacgagctctcactggtaagaacctacttacagcagaagtgatggttgcagcctgggattaggtttctggttcagggcatggggtgcagagcaatccgctccagccccgcaggggactccgtgcatcactggcaatattgatcacagcagagagcgtgggccgaaggtgggaggcccccctggacttaacctttcccacctagacagaggtactaacgacagaggcttcacctgcattctctatgctctttggtactttagggattgaccaagttacgtgttaaatccttgaaattacatgcaaaacattttcctgaagattgcacacacatggtaaaaatccaggtagtaaaagtggacagttaaaagcaaaacctccttagccctctctctgttgctttttcctgtcccagaggtaaccatggttactgatctgttatgtgactttcctcttctaccttttaaaagattttactacaaaagggagtctacattagggctctgcacgttgctttcacggttaactgtgtgtcttggaagctcttccacatgagcacgtagagctctgtttcattctttgtgttggctgtgtaatgttccttggtagggtttcactggttcccctgttgggtatttgtgttgtttcaactccttcctcattacaagcagtggcacagtaactgttcttatacaggcctttgtgacatgtaaatggacaaattcttaaaaatgaaattcctgggtctgtggatctgtgattttccagtttaagcagatacttgcagattgccctccaaagatgttggactggtttacacttccaccagcagaagttaaatgcggtgtgagcgtgtgcggaatgtggaaatgtgcacatggaatagcagctttctagggagaacatcagattttatcagattttcaaaggagtctggaactcagaagttactggaagcagtcgctctcaatccgggctgagagcacccatagctgagctgtcctggagtgtgaagtctagctttgctcagcctgtcttgggcccctcccttggtgctgtggctcctggaggctggcaggactcagctagaaaatcagagcctgttggagccgggagggttcttaggttatggagagtttgagctggaaaggcccttggtgaccctcaagcccagctctggaaaaactgtggcccagagtggggagggtatctccagtagtcacacagcaagtcagtgtgccagcaaagactagaactcaggtattcactcctagtctaggaccctttcccttccttcccactgccttcaagttccccaaagcagcgtgaagcacccaccatgccaggcacagaatatgttcagtcccacattatggctcctgccgagagggggtcctgcttcatttcagactggaatcgaagcacctaggtttgaatcccagccctgccatttagtacttgtatgtcccttaggcatacatcctgaacctctctaagcctcggcttcctgatctataaagaggggttaataatagtgcctatgtcaaaggctattaggaggattacagcagataatacacataaagcacttagaacagtgcctggcacatagagttgctcagtaaatgtgaactaatacttctggtacaaccattagtggtaacaagcattctagtgccatttcttcacggggcctttggagaagaaccaaagcttaaagaggcaaagcgcgacccctgctggtcaaaggttgtttccctcccatgccttagattaccttcattccctacatgcttattgagtgcctctgtttcagccattgtgcaaggcacacaggaaacagacttgctgtctagactccctgcataccgacagagatctggaagggccctgagggaccgggcacagtggcttatacctgtaatcccaacactttgggaggctgagtgggaggatcccttgaagccaggagtttgagaccagcctgggcaacataggaagatccatctctatgatttttttttttttttaaattagcccggtatggtggcacgtgcctgtagtcccagctactctggaggctggggtaggaggattttctaaagccaggagtgtgaggcctcagtgagctaggatcatgatactgcattcaagcctgggtgacagagcaagaccccatctctttaaaagacaaaaagcaaacaaacaaaaaggccctgagaagtcatctggacctcaggttgggccatggatcccagagagtccagcgatggacttgtaaggacctgtggacctctgtgtgtctgtgtgattttctgaggtcagcaacttctgtcatattcttagagtcaaaaaaagaggttttaatccagccatgtagtctctctgcccctgctcattacaccaatggaggaatcaaggctctcacagtgcaccgggcctgagccaggctagaatgaggtctctttcccccagtcctaggatcatttcccatcgaaaaagtcacaaacatgtgggtgctggtttggggtttaggtggggtagccaggatcctgtggctcctcaagagtgtggagtggccttttctctggctcctggcctttggcattccttgttggagtgacttggggtggcatgttccccagggaaactctccgtgctgtactaaaatctcatgatctttctcagtttgttatcaagcttggctaggatctccggcggaaaatctagatgtattcaacttcctgctctctcagctcaggtacactctgtacctgccctcagggtgcagaagcagaagagcttttacagtttttatagaaaaaaaaaaaaaagccaaacaagcttaagtgtagtcttccacttgtgtaaaaacaacagggtagggccaggcacagtggcttacgcctataatctcagcactttgggaggccgaggcgggcagatcgcttaaggtcaggagtttgagaccagcctggccaacatggtaaaaccccatctctacgaaaatacaaaaattagctgggtgtggtggcagacgcctgtaatcccagctacttgggaggctgaggcaggagaatcgcttgaacccgtgaggtggaggttgcagtgagccgagatcctgccactgcactccagcctaggtgacagagactgcatctcaaaaaaaaaaaaaaaaaaaaaaaagaaaaaaaaaaaaaaacagggtgggttggaggtaatgactacatacatatacttgcataatgaaagcccacctcatgataggttcaccgaaaagtagttagtggagttgcctctaggaggcagaaggggactttgagcaagagagagacttgcttttaattgtctgccctttagtatttgtgatgtgtcttcttttttttttttaatcatttacaagtattaccttgcttaatttaagaaattaatttttagaggtaatatgaataaacagaaagaacaaaggggaaatcagctagaatcccataccagagaatcattttggtacctaaccttccagattgtgtgtatgtgtgtgtgtgtgtgcactcagaatgtcccaataaaactgtatcataatattttaacagtagaatagacagacgttacccaagacctgcttgagtttttctaagtcatagctattccctggggttattaactctgaaaaggatttgtatgttattagcatacttacgtgtgttcgggattgttagacaatctaccatctgcacctagtatcttgggatcatcatcccaggtcatggaatgcccaccctgtgttctccctgtggtcctgtgatgcccaaggtcagtcctgaggggctggccatgcagtccatgtcctctggctgtggctcagccccggctcctgtcctctctgcttttccctcagctgcagaagctcctcctggccacatcctacccaacatcaagctctgacacccagaaggaagggaccgcctggcgccaggcaggcctcagatctaaaagtcaacggccttgtgttaaggtatttcttcacatgcccccaaatctaccccaggtgtctgttggggctgcagccttcagctctggtggaggatagcgagttcagtcaacctccaatatctcttcccactcctcccacagcccttgtagctggtgtcctgggcactgcttctggagatccagcctagtttagggttttctggaaggagccctggactttctcacactttagtgttccagacactggtagatgttaatgcagcttagagcaaggatgaggaaagtgtggccaggcttcagaggactgtattccaacagtgtgacagaccaaaatgcaagattgcgctggttgtggaggccacagtaaatagtttggattttttttcccccctcagggagcccattggagggtttaaagctctgccatagacatccagggtcaaagaacatcccttttcctccttgagccccatcttccaagcctaacaagaagaggcgtaacaggtgtttttcaaagggtcctgtcctcaaaggctacacacaacccctcctcttcctggtcctggacgcttctcctgggaactgttgcatccaatcctacatcctcagaggcagaatcgggacctctcagacagcagctcagtgtaggagcctctcccttgctggggcttctctggggaatgagtccctatgctccctccctatttgtcctggctgaccctcctgaaacaaaggtccaccctctcgtgcctcattctgttgaaggggcagcagccacaccccattgtgagccagctgtttgccctctgggagcctaagaagctccccagagaggtgagatgcatctgacagccattgctagaaagtcccagcacaacgatgagtcacacttggggggaaagccccagtgtggacaagcggggcgaataagactggagaggttggctggtgcgagtgcagaggacctcagacacccagccatggagcctcccctttatcctgtgggcactaggagctactgaattttttgtttttttaaactttattgaagtgcaatttacatacataaaagccacctattgtaaacaattctatgacttttagtaaacttatacccatgcaattgtgaccattatccagttttagaacatatccatcattcaggctggtcgcggtggctcacgcctgtaatcccagcactttgggaggctgaggcgggaggatcacttgagctcaggagttcaagaccagcctggccaacgtggtgaaaccttgtctctactaaaaaatacaaaaaattagccgggtgtggtgatgcacgcctgtaatcccaactactcgggaggctgaggcaggagaatcgcttgaacctgggaagcagaggttgcagtgggccgagatcgatgaatcccccagtgctcatttgtagcaagtccttcctacgcccagctccaggctaccatgaacctactgcccggctcttggctgaggggtacggagcagggaggcggaatggtcagagtggggctttgtcagtgaatctggaagggtctgcaggggcgaaattccatggctgggagagctgttaggaggctggtctttccttcattcctcatccactgagcacagccaggtgcccggctctgtgtgggaagctggggacggaatgaaggaaacctggctgttcctatgatccaggtgagacacaatgggccagccagtgaccatgcggatgagacacatgggaggagtgtttgggcctccttcctcactctggcctctctccctctctaggcggacagcacccaagacaagaaggctcccatgatgcagtctcagagccgaagttgtacagaactacataagcacctcacctcggcacagtgctgcctgcaggatcggggtctgcagccaccatgcctccagagtccccggctccctgccaaggaggacaaggagccgggtgaggactgcccgagcccccagccagctccagcctctccccgggactccctagctctgggcagggcagaccccggtgccccggtttcccaggaagacatgcaggcgatggtgcaactcatacgctacatgcacacctactgcctcccccagaggaagctgcccccacagacccctgagccactccccaaggcctgcagcaacccctcccagcaggtcagatcccggccctggtcccggcaccactccaaagcctcctgggctgagttctccattctgagggaacttctggctcaagacgtgctctgtgatgtcagcaaaccctaccgtctggccacgcctgtttatgcctccctcacacctcggtcaaggcccaggccccccaaagacagtcaggcctcccctggtcgcccgtcctcggtggaggaggtaaggatcgcagcttcacccaagagcaccgggcccagaccaagcctgcgcccactgcggctggaggtgaaaagggaggtccgccggcctgccagactgcagcagcaggaggaggaagacgaggaagaagaggaggaggaagaggaagaagaaaaagaggaggaggaggagtggggcaggaaaaggccaggccgaggcctgccatggacgaagctggggaggaagctggagagctctgtgtgccccgtgcggcgttctcggagactgaaccctgagctgggcccctggctgacatttgcagatgagccgctggtcccctcggagccccaaggtgctctgccctcactgtgcctggctcccaaggcctacgacgtagagcgggagctgggcagccccacggacgaggacagtggccaagaccagcagctcctacggggaccccagatccctgccctggagagcccctgtgagagtgggtgtggggacatggatgaggaccccagctgcccgcagctccctcccagaggtagtcagagttggtggtctgcgaagtgggggcagggatggggtgcagcatgcccctctgcactgggagccaggagccctgtgttcaagtccccgtcccccaacaaagtgttatatgggtttggacaagtcccttcccctccctggctttcagcttttctttgggctagttggagcagatcttcagaagaacacctatgcatctctgagtttttcatcttgcatgggcaaggtgccacttaatgaattaagcaggcagtcaaaaagtaaacagaaaaggaggataattacaaaattgcaataggtactgtaaagaagactcactggggatgatgtgacagaagcgtaaggctataagttcagctccacaatgcagctagagttttaaatgctgctaatagcagtaatgataacaacagttagccactgtatacttaccgtgctggcactggtctcagatgaacagattgtccctattgagtcctcacaagaaggctctctggtagggactgtcatcgtctccattttatgatacagaaactcaggcacagagctacttaatgatgagccctatgcagggctgtctgtccagagctcacagcagtgggacttagagtcaagttcttcctcactgtgctacacgtttagccagaaggggtcactcttgcacctgtttgtactttctgcaaaatcaagtcgctctcccagctgagactaggatggaaggtggatttgagttgttctgcccttctctaaaagtggcagaggtgtttggtcacctgcccaaagggcagctgtgcttggcaccagtggaggcctagggtctcctccagaggggaaacatctgctagtgataccatattggggaatcttatttttctgtgtcttcttttcagactctcccaggtgcctcatgctggccttgtcacaaaggtagatttttagaaattattggtgtattgttccatgagattttgtcttgttggatgtgtgtgttggtggtgatgggggattcatcagcgcccacccctggccccggccccacaccctgtgccctgattgtcatctgggaccctcaggagctgggctcctttagaagggagttggtgtttagaaactgacttttgcaggccagaggaaaggcctcaggccatttcataacctgtcctcttgggggccctgaaaagagttcttttctgacagtgccctgtggctttcagcaagtccgttcctccttctgggcctcggttgctccctctataaaataaggaggctgacaacacttgtcctctatttaccctccagtgaaccttgcctgtgtctcctaaaagagctgtgcagcttgaattcctctaacagccgggatggggtttcccccagagcgaatgcatctcaggctccatttccatgggcagtggaaccagggcctgtcacagcactccctgcgaccctttcatgggcggggaggtggatgcctgctgctgacttgcttctttcctttctgtcctccctgcctccaccagcgacccaacttttggcaagaagagctttgagcagaccttgacagtggagctctgtggcacagcaggtgagccagggggcttccactggcaggtgccttcaggaaaacacccgtgcatctctgagtttttcatcatgcatgggcaaggtgccacgcaatgaacgatgcgcaagatgcctgccttcacggggcttatgttataggcagtcaaaaagcaaacagaaaaggaagatcattacaaattgcaataggtaccataaagaagactcactgggaatgaaccagcattacaggcgtgagccaccgcacccagcccaggtgggcagttttatctgcggtgcctgccccctctccgtcatgggaaacaccagaggcatatgagaggtatagttgggagggtttgttgaacgattggacgtagatcaggaagaggtatttggatgactgggaggttccagctgccattagtaggtcacagaagggatggcaaatggatttcatcacatgccaactccaaagaattggaggattcccagcctacctccaggctcagccagcagtgcagtgatcagttagtgatgtctgccatccactgggttgggggagtaaaggcacttggccattttattgccatcccaaactagggtcttttttttttctttttttttttttttttgagacatagtcttactatgttgtccaggctggagtgcagtggcacgatcttggctcactgcaccaacaagcctgtttaatttttttgtattttagtagagacatgatttcaccgtgttggccaggctggtctcgagctcctggcctcaagtaatccacccacctcaccctcccaaaatgttgggattataggtgtgagctaccaggcttggccccaaacttagggtcttagtgtcccttggagaagtgatctgtctttatcttacctttctcctcttcctcgggcaggactcaccccacccaccacaccaccgtacaagcccacagaggaggatcccttcaaaccagacatcaagcatagtctaggcaaagaaatagctctcagcctcccctcccctgagggcctctcactcaaggccaccccaggggctgcccacaagctgccaaagaagcacccagagcgaagtgagctcctgtcccacctgcgacatgccacagcccagccagcctcccaggctggccagaagcgtcccttctcctgttcctttggagaccatgactactgccaggtgctccgaccagaaggcgtcctgcaaaggaaggtgctgaggtcctgggagccgtctggggttcaccttgaggactggccccagcagggtgccccttgggctgaggcacaggcccctggcagggaggaagacagaagctgtgatgctggcgccccacccaaggacagcacgctgctgagagaccatgagatccgtgccagcctcaccaaacactttgggctgctggagaccgccctggaggaggaagacctggcctcctgcaagagccctgagtatgacactgtctttgaagacagcagcagcagcagcggcgagagcagcttcctcccagaggaggaagaggaagaaggggaggaggaggaggaggacgatgaagaagaggactcaggggtcagccccacttgctctgaccactgcccctaccagagcccaccaagcaaggccaaccggcagctctgttcccgcagccgctcaagctctggctcttcaccctgccactcctggtcaccagccactcgaaggaacttcaggtatgaacagggggctgcaggagaggcagcgggcagtggaggatcccagttcccggggagccaggagccccaggagggaggatccctgggaagcttgctctgaaactgaggctgcatctcccagtgtggcccatgtcttggtcaggagccttgaaggtggtcttctggggcagttgtgggtgagttctggaggcaggcacagcctggtctgtgaaatcgagagtgtcccaaacatcctggcctccagaaagaaagaaaacccactcctggctatttgtgggcttacgtctataaaggaacttgtcccttatccatttgtactttttgcttttatgtttgtaaaatggataagtttttgtgcaaacatacctgccccaacagtttgaattctagggatgtttataagtaaaagaaagattagtgtaattctaatctgtgctctggaaaatacctggacataaagcattgataaggtttctgggtcatgctgagttgtgctgtggctttcaccagttggctgcccctcgaagggctttgacctcagtggagggatgatgcctcatgagcccgcttgctcgtatcatcctcgctcgctgaaccagactggagaagaagccagtccaaaagtcagctggggagctgggcagaaaaaatggaggtttggcagattcagagggtactggttgctcctctctgatcacagtgggtcctgattctccctggggaaggcttgaggacagtcagtgtcatcatccccagccctgtgttgaggtgaagctgagtggccactagatgctgctcttgggctagagcccagctgccgaatccgctgcaggatttgttgcgcctccactggccggcccacacccgggtgtctgatctgtaggtctggggtggggcaggggcaggggcaggggcagggattggcgtttccaacaagtccccaggtgatgatgatgacattgctagagtatcatactctgagaccagaatttaggtcttgcgaagatacctcttcttcccttctaaagggactagcaaaaaaaaatttttttttgttaaataaaatgtaaaaagacttcagctttatgtttatacatctacaacaagtgttcttaactgtttgaaaacctgattaaagcaaaggcccatctccatattaaaatgtgcatacacatctaactgggcattcaattttagggggtttgtgggctccccgcaaacttgttaagaagccctaaattttttgttcctcaaagtgaggtccgcagcaatttctccagcaagcccttactgtagaagctaggattcgtcagtcacagctgcgttctgccgacttcgctgagcctctctttctggctccattctttcccgggggtagcttctgccctacagtggtccaatgtcaaaggtttggcttcagccttgctttgctgtgagctaaagcactccatctccacattaggcagttgcccaggttctcttcatgttgaaatacatcccccaagctggagcttccctggtctcctttctctcctgcccagctcagaggtgtttgggctgggcctgcattcatagaattgcctgggaagagtcgagaacttctctagaaacccccatggattttcctttttctcttctcacttttgggccaggttcagggctggctttttctgctcactacagaaacttaattgggtaacctggctcctgctcagctacctggctgagctcagtacctggtaaacctggtaagatactaatcagccttctccagacctgtaccaaacactcagcaacagaaagcacgttaagctgggttaacaacacaaatcttgaactccacgataccttccaggcactctcagctcttcaggtggggaaattctaccaattctgttgcaaaagggatgataatacaataattaggtaaccctttaaagttgcaagtaatttcccctcccattatcctactagagcttcacaggtgcacctggaggtatctgctgcttatccccattttatagatgaggaagctgaggctcaaagagattacatagaaaaatagagcaaatatttacggagcagttcctgggctaagcattgacatgcacttttaaatttaatcctcacaaatggccaagggatggacacaattggttatccctattttatagatgaagaactgaagttgagagggcttctgtaactggcccaaggtcacccaacagggaggcggtggggccaagcttcaaactcaagctgtctgactcacaagcctgtgttcttgtcctctgtgctgtatttgtcagtgactcagactggatgagtgagggcagcgtgcaagcaggcaaggaaggctgcaggtgggtggcacctgggagcctgctcgggctatgggactaatgagcctgatagctagcctggaagcatggagctgcaatggccaggggctgctgcttggctgaggcatgaacccaaagggaacagtggttctggaatcagaaggacctgcttctaacttctctgctttctggctttaagcaaatcccatctcaaacctgagcctcagatttttcatctggaaaatggagaaacataaaacctcatggggtttaaaaaaaaatcaggtcaaataagataataaagcaaaagggcttttctacccctaatggcatagagaggcaaggctcagaatggggtgggattataatgagcaacacagtggttcccggtgatccagtccggaagctggcagtaggcatgtgtccagatgttcaggcccacacacagccctgggccgtcgttgcagaaggggaagctaggtttctgcgggaggcagttccagctgtgtgccctcgtgaacaaatcctaaggaagcatcccttgcgtcctggagcagatccgcccccacccccatggtatctcccgagagtgagtgcctctgctttgcttgttcactgacagatgtgagagcagagggccgtgttcagacagaacgccaagcatccggcacgccaggaagcggcgggaaaaggccattgtaagtgatctgggggcccagagcctggagtgaatgggaacggacaggaagtgtgtgggggcttcatggaccaaagccttttgaggctggctggtgagcccctcagtcttcggcctctgcctggggaagaagggactatggcaacagcagacaatgatatttctctcatttgaagagcacgagggtcactaaagggcatcaaaggtggcaccatgcaaagttcaaccaagagactggccatgagtgtgctgttggtggtgatttagggctcagcgtcaggggccttgagagagccaagtgggcgggctgtggtagtggggagcagagccaggctggccaggttacaagtcagccctgccaccaccttctatgtgaccgtgggcaggtcccccagctaccccgagcctcacttttcctcatttgtacgtaagggagttgggcctgtgcttcccaaggctttccccaacttgatcagtgccgagagaccaagagagcctgtcccttcctccccacccacctccctaatgccttcccagagttagtccacaggccctggccttctgcctttgcctggtgaccctactgcaaagctccccacagagaaaacacatcaggggcctggagtggggagctggagctggccagctaggctatgtcactagaaaggaaggaggaaagtaggatggaaacacaaaaagacaaacagactcctgctgagtctctcccatgtgatgtggcacttcagggaggaggggcacacaggaggtatgcataccctagaggtgcacagctgtctgcacacaggtccttaaaaccgtggactgtgcatggagcatcttcttggagtctgggtctggtcattcagcagttacaggcctagcacagttctgggcgttggaggacagcaatgaacaagagggatgaggccccccttctggctgaacagaagggagagagagataatagactcataaacaaaggaataaacaatgtaattacagattgggataagcactgtgaaattagtaatgtgcaattagtaacaatctaaagtaaacaggactgttgaggaagatgtgtttatggggtggccagggaagggcaccttcagggagctgggccctgattgatgaaaaggagcaaccaagcgaagactcagggggacaagtgtttggagcagtggcagaaaggagctttatgaattcaagaagctgcaaggagagtgggaggaggggatttctctgttgagctgagcttggacatcgtatgttgtgggatgtacagttcccctgactgttgacgacggagtcctgtttgtggacccgccacctgggttttcttccttggcatgtgtagtccgtgggtgggatggctggagcatcactggctataacctgtttccagagcaagcctgtccaggacaagaaactgtgtgtttttcctatgggaacacagatttccaggaacaagcctgcagcttctctcgcaggtcagagtgatttgtccaatagcagtggcttcaaccagatcaaatcacagatctgagaggaggggaaggggagttccagtctggactttctcccaccccttccctctgctaggctgttctgggcacccactggcatagcatggaactctcctgaaggtgacgccttggtgacagtgtctatactgtggcttcagccactttgcccaggcaaaaccaatatccctgatgcccccaccccattacccttccttccagcccactctcacactcacaatcaacctgcctcctgtgcttgccctaccccagcacctcccctgctcagacttgaaaggttaagtccaaaagctactgaatatgcaggcatatcaatggtgataaatccctcccccttcctagccccagtctttgctcatttccttcatgtaagcagtggcttccttggaggcctcttcccttccaacaccctcccctaacaagggcaggtcctctggggtagagattggcattgtcctctctctgactccagccggtattgctcactcagccaggcatcatggactaggacaaggactccacgggagcccactcccagaggggccccaggaagccaggcaatgacggagtctctctctgtcctccttcttgggcagggggaaggccgcgtggtgtacattcaaaatctctccagcgacatgagctcccgagagctgaagaggcgctttgaagtgtttggtgagattgaggagtgcgaggtgctgacaagaaataggaggtgagttgaaccaagccatggcaaatgaagggagcagagaggggcactggtcctgatccagaattgggtaccagaagatgcccaagatttgtgaaatgaatctgacaaaatccatagcctagatgtggaaagccaggcccatgagaaggaccagaaatggtaatgcagtcagtaatagcagcaaacacgtgctgatggtttacgaagtgccaggcagtttcctttcattcttttatctaaacttcccagcacgccagggacataagcactcctggtctttcaattgctctcctttctgcaggagttcagacaagttagctgggcagctagttggtggcagagccagaaccggagcccatgtgtctgcttcagggcctttggcctggagatagtgcggggcagcagcccctggcagcttgaagacttgcactgggactccactctacctcagccctgtgcttcctctgcagcaccctcccttcctctgcagcagcaagtcccaggccttggttgggtatggcggctcacacttgtaatcccagcatttggggaggccaaggcaggcagatcacttgaggtcaagagttcaagaccagcctggccaacatggtgaaaccccgtctctactgaaaatttaaaaatttgctgggtgtggtggtgcactcctgtattcccagctactcaggaggctgaggcaggagaatcccttgaacccaggaggcagaggttgcagtgagccgagatggcgccactgcactccagcctgggtgatagagcaaaaaataagaaaaggccccaggccttttgttctactaggcagccctggtttttcgtcacttacctggagaagcagtgttttacctatcaggggatctgcaaaaagaacaggtttcatatgaatgcacaatttagatgtcaaaactttgtcagttttgaaatctttctaaattatctcctattatatcggcaaactaaggcaaactaagttattcgggtttttacattctaatacaataataataatagaaagcttcagcaagaaaagagtttctggtgtaagagttattatatacttcttgcccattaggatggccactatcaaaaaaccagaaaataaatactggcaaggatgtggagaaactggaactcttgtatagtgttggtgggaattttaaatgatgcagccgatgtggaaaacagtatggcagttcatcagaaaattaaacctagaacccccatctgatccagccattccacttacgggtatatattcagaagaattgaaaacaggatctccaagaggtatttgttcacccaagctcataacgacattatttacaatagccaagaggtgaaacaatccaaatgtcccccaacagatgaacagataaacaaaatatggtttctatacatagagtggaatattatgaagccttaaaaaggaaggaaattctgactcacgtcaccacatggatgaacctgacaacattgtgctgagtaaaataagccaggcacagaaagacaaatactgtatgatttcacttatatgctatgtctaaagtagtctatttcgtcgaaacagaaagagtgatggttgccaggggctgcagagaggaggaataagggaggtgttgtttaatgggcgtagagtttcagtttggcaaggtgaaagatttctggagcttcgttgcacagcaatatgagtatacttaatactgccaaactgtatgcttaaaaatggcaaagatggtaaatgtcctgttaagtgtttttgccaatttttttaaaaaagaaccattatacaaatagaaccattttaagttctgtgcagttttcaagctatcaaatgaagatagcatgcaaaaataaagcaggcaaattaatctctaaagagaaagatcagtctgttaagattttaaaaaaacacacaggatctttaaaaaagagtcttggacgtactaccaatattagacattaaagaggaagaagggtccgggcatggtggctcacgcctgtaatcccaacactttgggacagattacttgaggctaggagtttgagaccaacccggccaacatggtgaaaccccgtctctactaaaaatacaaaaaattacccgggcgtggtggcacatgcctgtaatctcagctactcaggaggctgaggcataagaatcgcttgaacccggaaggcagaggctacagtgagctgggattgcgaccactgcattccagcctgggtgacagagcgagactctgtctcaaaaaacaaataaatagataaagaggcagaagggttcaaacttggccctggttcagagaggtgtcaggaaacatgattcacgtaaatgtttattaggcacccactatttgtaatcctgtcctaatagttggtgaatgccactttgtctctgccttgaggagtttacatagcagatgatatgtcagtcgggactctttctgttgttcatggaagtgaaaagttggaatagaattgacttttggtccttctcgggcagacttttctcctggttgcagagtggctgcctgtagctttaagctaccccccagcagcttagagacccctgagaaggtaggagtcactacatgactccagcaaagacctgagatggattctttggggttcagccttaagtaaacaggcttatccttgaacaaaccatggtgtccaggaagggccattgtcacgtggcttgccctggcaccctgagcctggttgaccacacatgctgttgtcagaggaaggggagtggaagctgaacaggcaggcatcatagatgtctaccatgaagggcaagatgcgtgcagaagaccagccctactaggggaggtgaaggccaagatggcagccaaggaattggtgactgaggctggctttgaaggaggcagaaagtggtacagtagtataggcaggggaatggcatggcaatggcaaatccagggaaatgggaatgataggagaaacatacagcggtgttaagagcatcagctttaatgtcagaggcctgggtttgaatccctgctctgccacttgcttttgggtaaattactgaactccgcagaacctctttcctcatctgcaaggtggagataacaacagtacccacctcacaggctcatctgaggagtgtctgaggcaagatgtgatggccaacacctggcagacattcaacatattagctgctttcattattaccacattgcagaagtcagcccagtggtcatcatcatctctatctagggggccacgtgatgtgggtatcgaatcactgtggcagtcggttcctcatctagtaatgggtggtctcacagtgtccacccagccagcccaataacatactctccttgctccctccccgcagaggcgagaagtacggcttcatcacctaccggtgttctgagcacgcggccctctctttgacaaagggcgctgccctgaggaagcgcaacgagccctccttccagctgagctacggagggctccggcacttctgctggcccagatacactgactacggtaagcccctgaaacccagccacagtctagtaagactcaaagcttgggaagcagtgccttccttgaacaaaacccagagctaaagcgccttgtggacatagcttccatccccacaccccagtgtgctgcttggtataactttgcagccactttgcctgaagactaccatcctgtttctcttctggcctctggtccaccttatcctgtcctgtgactgctaccaaagagaatccagcctcccacggcctctaggaagattcagtcatgtgcacagccagctggcagaaccgtggctacggtctccttgacttcacagggccagctgctaccctgtccccttcaggggcattccgtggtgaccccagacaaggcagcagccacctggggacaagatgatgaagaaggacaaagaagtacaatgtacgaaagaattacttggccaggctcagtggctcatgcctgtaatcccatcaccttgggaggctgaggcaagaggatcacttgagcccaggagttcgagaccagcttgggcaacatagtgaaatcctgtctctacaaaaaatataaaaattagccaggcatggtggcttgcgcctatagtcccagctactcaggaggcagaggtgggaggatcacctgaacccaagaggttggagctgcagtgagccatgatggcactactgcattccagcctgggcaacagagcaagaccctgtctcaaaaggaaagaaaaaaaaaaaaacacttactggagagaatccaatgcagccttgatggtacaggactgagtgtcagtgacccggctgggtgccaggccaggcggccctgcccttggctgcatgtccatttatgggaatcagtttcccaatctattaaaaaattctagtgttggctgggtgcagttgctcacgcctgtaatcccagcactttgggaggccgaggcaggaagatcatgaggtcaagagatcgagaccatcgtggccaacatggtgaaaccccctctctattaaaaatacaaaaattagctgggcgtggtggcgcacacctgtagtcccagcaacttgggaggctgaggcgggagaatcacttgaacccgagaggcagaggttgcagtgagctgagatcacatccctgcactccagccttggtgacagagcgagactgcatctcaaaaaaaaaaaaattctagtgttgttagccctcccttatgtggcactgcagcaggttactaatggacgagaagctgttgggggaagtagagttgtagggtgttggagctagaaaggctctggagtgctctagtttgggcctccaggtctctagataggacagccaaggccctgagacactgataccatggccaagatgtcccagcaggatggcaggcagtgcccacagtccagcgctcatcccagctccccaaggccttgggctgcagccactccacggtgcccactcatagtggcagattcttcaaccatccggtctttgtaagttgctcactgccttcccctcttccctgcctcttcacccccatgcccagattccaattcagaagaggcccttcctgcgtcagggaaaagcaagtatgaagccatggattttgacagcttactgaaagaggcccagcagagcctgcattgataacagccttaaccctcgaggaatacctcaatacctcagacaaggcccttccaatatgtttacgttttcaaagaaatcaagtatatgaggagagcgagcgagcgtgagagaacacccgtgagagagacttgaaactgctgtcctttaaaaaaaaaaaaaatcaatgtttacattgaacaaagctgcttctgtctgtgagtttccatggtgttgacgttccactgccacattagtgtcctcgcttccaacgggttgtcccgggtgcacctcgaagtgccgggtccgtcacccatcgccccttccttcccgactgacttcctctcgtagacttgcagctgtgttcaccataacatttcttgtctgtagtgtgtgatgatgaaattgttacttgtgaatagaatcaggactataaacttcatttttaattgaaaaaaaaagtatatccttaaaataatgtatttatggctcagatgtactgtgcctgggattattgtattgcttccttgattttttaactatgcactgtcatgaggtgtttgccactgagctgccctgctccccttgccagattgccctggaggtgctgggtggccgctaggctggtctgcaggaaagcgcggcctgccgtttccgggccgtatctgccaagccctgccttgtctcttactgagcaagtttggctcaaattataggagcccccatcttgtgcccagctcatgctccaagtgtgtgtctatccatttgtactcagactcttgagtaccttgtaaggaaggcggggcaagctgcatcattcctgttttccaggggaggctggcagctcctcaagaggcgaaatgactgtgggaggtccggttaccagtgaggaggcagagcggtgacccagaccaggccttctggttcttggtcccgtgcttccgtagtagctggggtaaagacaccgtttcagggactggtagaggtgagttcggctaaattgggcaccgggctagaagcctaagggctcattttaggggttacattaggtgttgattcaccagcatcaggtgaattcaagccctggcatgtgtcttggatgcaccatcagctttgatcctgagtggtcctgcggtttgtctgtgcctgtggacacactgtcagaacttcagtgacacccctggcagcggtacagacaggtggtctgggagcagtcatcttttttgggccagccaccagcccatcctactccctcaggtagtccttcgtctttaccttgtccttgtctgtaaagttgttttggtggctggggcaggggagccaggaggagggagtgaaggttgggaatagataggacaatctcctagctctcctccaattgagaaaacactccaattgggctttgctttaaactttgtgttcttaagtgatgtcaaagccatttccagcttaatgttctgtgggtaccttgggggccattcatgcagggagcatggccaggcagggtatgagtacattgtttctgatttctttcatacatcagggttcctcgggaaatttttgtattttttttttaagtcctgctgctttaaaaatttgaaagtggctcattaaactaaacaggctaatgtaatttgttgcttatgccaagcctagactgttgagaattgacgtttttaaagattatcaaatacctcagtaggtaaaatgagcccatgatcttccactgagtggtgagcatactcccagcccatggacaaggccggaagagacaggctttagtaggggtagggaatttgaactgttgtgtgtcacagcagttgacctctctggactccaatttcctttcctgtgaaatgaactgattagacatgtttcaacattgttagcttctgctgaggcagtgtctagcccaagatggcaaatacatagctcatgtgccactactcccacctccttgaccaatacagacataactaatcaatcacaccactcaggttccctgagcctggatgtgctataagaatcctgaaatcagtgctctggtaagtcattactaattgattagagttcaatctatttgacatcttgggctaatctttggaaggtttccaacaatcacacaaaaccatatgctggctgggtttcatgctggcctatccctgtctgtgatgttccgttccatgagagaaaactcccctaatgctattccatggcgtaacactcccaatactattttgacgcccacgtccccttgcagagggtgcagggggcggtagacgaatgacagacaggaacatatttggggaaggcagggcttaggaagatggaccaaaaagggacttcccacagcacagacctgatcattcggatttcctctttagctattcactgcctagcacatagtaggcacacaataaatgattatggaatgggataaaatttagatctttctgctgcctccactaagttaagtcctgatttacatcaaggagagaactgagataggaaagaacactagattccaagtctggagagttgggggagtccagattctaccaagaatttcctttgtaactttggtaagtcccttttactccctggcaccccggtgtgctgaaaggagttggtccatatatgatctcttagcccctcctatttgcttcttccttgattgctcttggtcaaagggtcagccttgggctggtgatactttagagtaaagaaatggagagttttagcaaaggaccagtctgtccctccctgctttggggtcagctaaagctgtcctttcatgtcagattaacctaggacacttgtagttagcttagacgttggcccttgagcagagacctgagcgtggcattgggacatgacatacctaaagtcagggctaggggacgctgcctgccaagggcatcgagtagtctctacttgctatcccgtacataaaatgctacaagttctaaaatttaccgaccctgcagacaacctctatcccgaaggactcattcggtgctgtgtattatttagggcaactccaaggtctattcagaaaaacgagtgaaccttggtctctttcccaccaaattgaggagtaacccagagggagcagctgccattggcaaccatctcgttgtagctctgtcctagtgtttgctcttgatgatgtttacatgtgatcgccataaagcttgctgtagactgtgtcgatagccgcccgcacagggcaggtcgtactgtccgtttctgtgccgtgctggtgttttccaaaaatgtctgatccaaccactaagtggaattcttccatctccttcctcagtctgtacaaggctgaatcagaatccccattctcgggggctctggttaccgaaggaaaatgcatcaaagagttaaagaatatgagtggatggagtgcagctaaggcccccaccccctgctccgtcacaacttgccccctcaaccaaaaagctgctttgagtcaaaaagcacccataagatacctgcatctgccttgaaatcttgcagcatggagtgtcatatgtactcaggagagaggcagggctttgcgggcaggagaaggaagggaggaatgctctgagctgcaaagacccagtactcaagttctgacgtgggaggagatgcagtgagacgtctcttgttgcctaaagcctgttcctgttggttttcttagagtgatttctcctagacatgtgcagtaggcccactggggctgctgtgcagtggtgagtaaaagggcagggaaggcatggacagcctggtccttctgcatggacagctcagtccatggcccatcccaggtatagagttcagttaatcccatttgagcctgcagcttaagagatggctcatcctaactgtgaagcaaaatcagccccagaggatgtattgatctgactcactgatgtcaaaattgcagtatttttttagcatttgagatttagcagctgccttcagtttggggttacccacatcccagcatcagatatgattaaggaaagaaattggatgtacaacagcaaagaaagtgaatgtcatggtttccctggccaaagaagagggaccctgtcatccttaccaatggggaagaagaaaactagtgcatgtgcaatatgtcaaagttagtcccctagtccctgaggggtttttacacacagatgggctccaggtctgctcgtcaagtttggaggtaccgggtaaatggaggggagctgcagagttggaaacccacatgcatggatgtgtccttggcccagaaccaccatgggatgggggaggccctgagccggctacaagacacccaggaagtaggcaaaggctgactttgcattaaacaataaaagcactttgagaaaaccccaacacttcagcctgggtccgtgtttctacactggaaaatacgagtctcctttggctgtgtgaagtgatcttctagagactgggacagggagtttgggaatggggctgctgtcaggtaggagagagcagagatgcctttggagatgtcagcagcaggagagccagtgctggggccaaccctttgctggccttttgttggaagcccttgaaacagggagccatgggtttagatcttggtacctacctttacagaaagatgaaaacagcccagctgagtgaaatgagtttgtagagtaagtcacttaactgtaagccatctcagaatcagaaaccctaatgtttcttacttgctatgtgaccttgggcccctgtttcctcatctaccaaatgagaatgttgaatatgagcattaaagtccctttcacctctgagaggctcagatccccaaccaggagcattgggaatccatcactcctccttgaaactgattccattctctgacttgacccagctcctgttcagggtgagggttctctgcaagaaccaaccagcagtaggttcaatcccactgtgtcctggctgagttgccttatccaagaagaccagctccccgggacagatctaagccatagtttctagtggggacagtaaggaattaaacccccaacttggctaggtaacgatgtcaaatctcacattaaccttgtctttgtccccactggatagctgttaatccgaatgttgtgaccatttggctgtttctctcttgttctcagacaatactagcaatacactttttttttttttttttaaagaaaaacagcttaggagcttttcacacatttctttcaaatgattgtaaaacatatggggcaacaggaggcattgatcgcgctgcatatgtttagggcagcttttgttttttgtttctttaatggtatagcagcagtgactgagccttcgtgattcctggggacagcttttcagatactctgtttcatcagtatgctttgcacatccggaaggagtacaaaaatccaactgcccaaatttggggcttggaaaataggttttataggtggtcggtccctgggctgtgcaacaactcctcaaagaggggtttatataactagaacccccctgggctgtatttttggtcaaaggagtctccaaggcggcttacaaaagcttcctttttcacttgaccacccttgctcattggttacttgtgaagggaattggtcagtttccacctcagcactttgccttatcaacatgcggtcgccatctagtggccaaaggttgtctccaccagctacccagatggaaggcaaataaatcctttcggccaccctgctgtccatcgtgaactttgggaatgaaatataatggcctgaacgaactgcctttgtgttcagagatcagtgcaacactagggtcagaagactccagaagcagccacttagtagactctcacgcagaactgagaaatgcactagctgtcctgtgggcagaagagacaggagtggaccaggagaggtccaggtgcccgggaagggtttactgtaactgcaatactggcagcccagctgctgaccttgttaagtaaacctttgctgggtggtccgaattctgccctcaaggcaagataagaagttgggtgtaaggattttgtggggggcctggccatgatctttgatatgatccccgaatagccaaatagttttttttgttcaattttttgtttctgtattttgtatttttaaaatcttgtcaaatgtttttgtgttaggaataaaaagtcataaactattcccaactttgtttcttgagggatgttctgattccaatggaaacaggtgggaaatctcaaggggagcgtggacaaggtggtatgtgcagcaggggaatagactgcttggatttccaaatggtttctggggaagatgaccatccagaagtccagcttagtgcagtctgctctggaattcacacccaccccctcgcctccttgtgccatgttgttagcattggcttggagcatctgcttcttccagaggcagctgctaatgttgaaaccaacacgagccctctccccaaccccaggtttctaaagaaggtgtctgtagccagccttaatcaactgggcaaggtggtccctatggtcctttccagcatttccaaatcttggactcaaattattttctcttggtgtgaccacacagcctagagaattctgagcaataggagccagggctttccctgactctgcgacagggtcaaaccaaggaatggctaaacctgtgaggttttgtcatccccgggggtactactgtagggggcattatttattaggaagcttaacaaggtaactacggcctgagtgcgtgagtgtaaggctgtgtttgtggtgggggtgtgtgtgtgtgtatctgtgcacacatacacacgtctgtgcctgtgtgtgtgtgtttgtgtgtgtgtgtgtgtgtggaattacattgatgcatttattgagaaaggtgcaagaatttcacctacacagagggacacatctgctttgttatttataatagaaagctaaattttaattttttaaaggacactgctaatgattgagaatcaagtttttagttttgctattttttttaattggtagaggatttttatatattttttccattttgttgggttgtgtccttatttatataaatactttatccgtaagaggcaaggaggaaaccttctttgcttttacatattgtggttgtcatcgtccctattttatttctggtgtgatttctctgtcttaccttctaaatgagaaaatgttttcttgtatttgtacattgtcagattctatagtttcctagataatttaaccaaattgctctatgtattattattctgtgagtataaagttctattttaatgtctgtaaatacttcagaactggcttcttttctcaaactcccactgtggggttattgtttacatcacagaaactgtagaatctctatgctcatgtactgtaaatagtgaagtgatctgcttataaataaacttaacaaatacactatggagattaaaaacaaaataccacccacagctttgcccatgtgtgtttttccttgttggtcctgggagctcattgagggacactctgaccactaaatggggaagagatttcagttttcagcgtcaccttctcagataagaccccggatgatgtctgctcctcacctcaccacacttctccctccttcagagcacttttcacagttcataatatccattcgtgccaggcacaggggctgaggtgggggatcacttgagcccaggagttcaaggccagcctgggcaacatagtgagacccccatctctgaaaaagtaaagtaaataaaatataataaataaataaaataaccattcagactcatctcacataacagctgttccatgaacgactttttgccctgacttttataaagctataccactttctgaacaaagacttccttgttttggtatatcaactttcacataagcacattgaataaatgcactgtaggaggtattttggcattgtggttccaggcaaaacactcatcaatttgtaattacaaaatggtttctggtcagaggatctcatagagagcaggcctgcattgtgtgcggtaattgaatgagctcagaacattttcctttgtgtacttccagcaagtagggtgaggaagtggcatcttccaagactctcagttgcgtgcctgtgtgttatttcctcacgtctcaaaggggttagcctgtattttgccctaaagctgttttttgtgctttaactttatttttaaatgccagacacccataagccccaaagggttgaaacactggcaaagagaattatatataaacaagaacaggctgggcgcggtggctcgcatctgtaatcccagcactttgggaggctgaggcgggcggatcacctgaggttaggagttcgagactagcctggccaacgtggtgaaaccccatctctactaacaatacaaaaattagcccggcgtggtgaggggcgcctgtaatcccagctactcgggaggctgaggcaggagaatcgcttgaacccgggaggcggaggttgcagtgagccaaggtcgtggcaacagagcctgggcaacagagcaagactccatctcaaaataaataaataaaataagaacaggtgcaatgaatgattacattttatgttatgtgcaaactattttcaggttgctatttattacataaactcatacaaactcatacatatattctccttgttcaggtgatttattttccccatctgtaaagattgtttggatttctttgattgcaagggaacacatcatgattttttcccattaaaattaataggaacgtttccacttaggggcagagttctctggtgtgatgagaatatgtgtgtgattgagggctcagtacctgttgcccatctgttgtaagcttcaggagaacaggcctgcctttccgttcactgcagggcactggccccatcagtcaggaattcctgagtagatcctacccgtagtgcaaggaataggatggcagatgcagagcctcaagacctgcctttgggacccatctctgccacttctgtattgtgtgaattgggcagaccacctccttggtccctggttttcccaaatatgaaacaatttgcttagctgaactcaaaggtcctttatgttcttatgttctttaaaaacaacaataaaacctgatttgcagaagcagtatggtacaaggaaaatgcttacaagctggggttctggggttctggtgtcaagctgcttggctttttttttttttttttgtgatggagtctcgctcttgttgcccagctggagtgcaatggtgcaatctcggctcactggaacctctgcctcctggattcaaatgattctcctgcctcagcctcccaagtagctgggattacaggcacccgccaccacacccagctaatttttgtatttttagtagagacagggtttccaccatgttcgccagactggtctcaaactcctgaccttagttgatccatccacctcggcctcccaaagtgctgggattacaggcattgagccaccacgcctggcctaagctgcttggctttgaaacttggctctaccgcttatcagctaggtgtcctcgggcaggttttctaacctctctaagtctgctcctcaccatgtgataaatggagctagtaacagtttctcccttggagtattgttgttaggatgaaattagatcgtgcacagtacctaggacatggtaagtacttaatcagcatcagctgtgatcctcattcagctcagtctcatttggtgctaaccatagtcctctgagagaggcactgcaaggatcttgacctttttttgacagattgggaaggctgggaagtggagcagaaggaacctgccgaagggactcagaaacatggcagcagagtcaggaccagcaacatcaatgcccgtgtgttcctgagtgacacttatttctccttgctactctgccatgtaaccaccaaacgtgatgttcttaggacaggcctctgcttaaagaccactgctatcagggtgtgcattgcagcagggcagaacatctagtttgggagtttaaagatgcaagttccagacccagttctctattgacatcaccacctgcaaacatgagcagggcccatgcgtcaggagcccagattgatctactgtggaggccaccaggatgtggctgccctgtacactatgttctctgtgatcctgggcatctcctggagggaagccagggaactgtgccaggaacttggcccagccccgtcttctcactggccttcaatttcctcatgtgtctaaaaagagagattacagtagatgagtggtttaccgtttggggaaaccatgtggctccctctcctcaaagcaactgttttaatatattagtttctgcataacattcagtgtggaaggaagaaaagttctagagctaatgtccatttattagaatgagacagaggaatgtgttacatgcggccacaaagaaacaaacagataaatacagaatgtgggaaaactgactctgtttctgcaaggtgatgacaatggaaaaaaggaaggagtactttgtagattaaaagagacttcagaaacttaaccatggctatgtgaggtgatggatatattaattagcttaattatggtaaccatttcacaatgtatatcaaaacatcacagtgtataccttaaatatgtatactttttatttgctaattatacctccataaagctggtggtggggggggaacgatagagaaggaaaaaaaatcaagatttggacaagtgtaacaaattgacttgcaaatttttagcatgttattgccattttcaacttctggtttatttgtgctgttttcaacatcagttactatggtatgaatgctgatcaggccagtgcattccgctaggtattgcatacttgccagaacatacttagattcggtttaaaagaaataagtcctggccaggtgcagtggctcacgcctgtaatcccaacactttgggaggctgaggcaggaggattgcttgaagtcaggagtttgaggccagcctgggcaacagaatgagaccccatgtctacaaagataggttttaaaaaattagctgggcatggtggtgcatgcctgtggtcaccgctgcttggtaagctgagatggaggattgcttgagcccgggcagctggggctccagtgagctatggtcataccactgcactccagcctgggcgacagagtgagacctcgtcatgaaagatagagaaagagagaaattctatctgccacatcttttttttttcttttttttttttttgagacggagtcttgctcttgttgcccaggctggagtgcagtggcatgatctcagctcactgcaaccttcgcctcccaggttcaagcgattctcctgcctcagcctcctgagtagctgggattacaggtgcacaccaccacacccagctaatttttgtatttttagtagagatggggtttcaccatgttggccaggctggtcttgaactcctgacctcaggtgatccacccaccttggcctcccaaagtgctggaattacaggcgtgagccaccgcgcccggccaacatctatctttttaaaccaacagaatgcctgctaatttaagaaacagaagttctggaattgagaataatctgacttaatttatactctgtgaaatcaatgaaaaatccaagaataaaaagtacatcttcttttttctaaaaaccaacaaaaagaaacaactaaattcaatatgtgaatttgtttggatcagattcaggcaagccaaccattgaaaacgttcatgagaatgaaggaaggttgattaagggctggcatcacaagttgggtgtcccagaaagcagactctaaaatggacttagtctgcaggatgcttattaagcagtgccctggggaccgatgcttggggaagggaaggaaataggagtgggcagagggagaagtcgagttgggatgtgagcccagcgacagccttagtggaccccacgaggagtcgtggagctggaacagccctgcacagttatcccatgctcagccaagatggccaggcctctccacctggcatggatcagtcattgggtgtaggccaccctggggaaggctgcagtaacacctgatggggttgatactaagggtctgtcaacagcactcaaagctggtggggtcccaagtcctttgctgaagcttggggtctgtgcagcccatcaaagcatagatcacagctgggtattaggcaggcattggttgcatgggccagtgatgtggttatgttagaaaacatacttatttctttaaagatgagatagtagaggtgtgaaatgatatgtttgggatttgccttttcttttgcttttgtttgagtcagagtctcgctcggtcgcccaagctggagtgcagtagcatgatctcagctcactgcaacttccgcctcctgggttcaagagatcctctcacctctgcctcccaggtagctgagactacaggtgagtgctaatttttgtattttttgtagagacagggttttgccattttgctcaggttggtctcagactcctgggctcatgcagtctgcccacctcagcctcctgaagtgctgggattacaggtgtgagccaccacgcctggccaggatttgcctttaaacacttcaggtaagaaaaaaaattgaaaagaaaatgtaaaaaggacagacgaaatgcatgtagcaaaatcttgatattggaatctgggtgatgggtatgtggggattcaacgtacaattctctacttttgaaaatgattgaaaatttttacaatacattaactgaaagtataagaacaaaaatgattctaagcaagccagtgaatctggcattaattaaatgtaattaaatgtttaactgatgtctatgaaagctagaatattggttttagctcaataggcagttctcaagactaaaagaatgtttaaaagccactggataaggtataagccaagcttgttcaacccacggcccgtgggccacatgcagcccaggacggctttgaatgcggcccaacacaaattcataaactttcttaaaacattatgaaatttttttttttggcgatttttttttttaagttcaacagctatcattagtgttactgtattttatgtgtgacccaagacaattcttccaatgtggcccagggaagccaaaagattgaacagtcctggaagctaaattctctaacagctttcaaatcctatgactcttctacttctcaaggtgtgtggtcttccactggcttgagtcatctcttcccaggaaagggtggtgccgtccagccagcacatccccagtggtgttactggatgcagcaggacttggatgtagttgcaccccctgggctggggtttccccccggctgatttcctgcggctgctgcaatgaaacaggaaaaagaacacaccaggtgacaagaggctgcagtgggcttcccctttgacctaatttggaccaagagttgcaaactcaaaggctttcagtggccaacagataacaacacatgcagaaggcaaaccaggtgtgaggagaatcacggaaacagaacatttctctaagaaaaatagcagcacgaggatgatgataagtgagaaccagtactcggcaccaatgtctgggagaccaggggagctgtgaacatgacaaactagagacagcctctgtctcatctaaagggggcagttgccactcggcttcagccaattgttgtcatgcaaaaatgatagactggtgtggccagatcttacctttttactcttttagaaagaaaagctgggccaggcacagggctcacgcctgtaatcccaacacttcaggaggctgaggcaggaaaatcacttgagcccaagagttggaggccaacctgggcaacatagcaagacctggtttctacaaaaaaatacaaaaattggccaggcatggttgcatacacctgaagtcccagctgctagggaagctgaggtgggaggatcgcttgaggccgggaatttgaggctgcagtgagctatgatcgtgccactgcgctccagcctgggcaacaaagcaagactctatctccaaaaaagaaagaaaaagaggctgtaaatctggattttttaaatcttaaatattccaattttaaaatgtggcccaaaaattcacatttaaaaaaatgttggtactgattctctagctataagaaaaaaaagaaggagaaaaaaatgtaagccaaatctgtatttttttatctgaaggccacaaatttgcactgatttactacttgcccaaaagacaatttgtacaaattagaaaaatgcacttatttcccaggatacctcactgccatttttctggaaaatcaaaatagctatacacatctgtgatgtacaggacactccccggagttgtgcaaagcataaactacaaaactctaagtggcccctacatttgcagctgcccatttagaatcaacccacgctgcccagagcagagctgaggccctgacattttccatgtgtaagagccatgggtgaagagggatgggtgtgcaaaggagggcagtcagggtgagggagggacaagatgccatgtcctgtgaggaaacagatcacacaatcagtaaaagaaatgacttgggggaggggcagtgctgtcagtagtaaagagttagaacaaacaaatcccatttgattctgaaggcagaaccatgaccactaagtggaagcttcaacaaggaacaatttgagttctaggaagacctttctaatagtggtactgaatgaggatgtcatataagatagtgagacctctgtcactggtggtatacaagcataagctcatgatggtatagataggattcaaacatcagacagaaggctggaaatagggcctcaaattccttccaagtccggacgcggtggcttatgcctgtaatcccaacactttgagaggccgaggcgggtggatcacctgaggtcaggagttcgagaccagcctggccaacatggtgaaacgccatctctactaaaatacaaaaattagccaggcatggcactgggtgcctgtaatcccagctactcaggaagctgaggcggaagaattgcttgaacctgggaggtagaggttgcagtgagtggagatcgtgccactgctctccagcctgggagacagagtgagactccggctcaaaaaataaataaataaaaataaaattccttccaaccaataattatagatcttctcctttgtcccagggtagggacatatgtccacagccctaaaatcagagtctgtgctatgttggttgccggggcacttgctgggaggcctggatcgttcctcagcctcaatcttgggaaccgggctctgtctcttactgtgtgacttggtctcttccagccttggtgctctcacacacagaatggggacagtattggccatcaggaggcctgaatgagactccgtgtaagagtctctgaggcaggacgcagacactgagtgctcagggagtggggtggtgggagtccctgcttcccccttccacaaacctgacttggccgactgctgtttctgcttcttctcctcctgcaccttcatcttggcatcgtactcatcagcaagcgccttccactccttgcgattgttggtgatcccgtccaacattggggtgatctcctcgtggaaacgggagaattcctagaagagagagtatgtgcctctggtgcaagggccaggccacagggtctgggctcaagcgggtggcacagctggaaacgtccaacactggaatgagctgcttcggagtagcaggcctcccgccaccgtgctgatactgcagggcctccggtctacaccagcccatgcctcacctgcttagaagcctcctgtggcgcccctgtccttcagcatgaagtgaaaaccccttactatggctttcaaactccatgacccagtgtcctcctgcccttgaccatcttgcattctccaagcaatccaaatctcttagttcctggagtgtgtcctccattctgtgagcctcacacaagctgctcttttcttttttttttctttccaagacagggcctcactgtcatccaggctggagtgcagtggcacaaacatagctcactgcagcctcaaactcctgggctcaacccatcctcccacctcagcctcccaagtagctggaactacaggctcatgccaccacacccaggtaattttttttatttttgtagatacagggtctccctatgttgcctaggctggtctcaagctcctggcctcaagtgattcttctgccttggcttctcaaagtgctgggattacaggcatgagccaccatgctcaacccaagctgttcactttgctggaacactctaacctcccgttttcttccttgaggcctccacttatatgtcacttcctccaagaagcctcttctggccccctagtggagtcccccattggaagctcccaaagccctctcttaccacatcttgcttccttgtcatgactccctttgcttgtctccccgagaggctgagaacctggagagggcagggacattggcagcctcattccctggggtggccctggcctagcacaaggtctgggacacaaggatactcagtaaatattttctgagtgaaatcgggatgttgagaagatgatttttttttttttgaaactgagttttgctctgttgaccaggctagagtgcagtggtgcaatctcggctcactgcaacctccgcctcccaggttcaagtgattctcctgcctcagcctcccaagtagctgggattacaggcatgcaccaccaacccagctaatttgtttttttggatttagtagagatggggtttcaccattttggtcaggctggtctcgaactcctgacctcaaatgatccacctgccttggcctcccaaagtgctgggattacaggcatgagccacctagaagatgattcttaaaggctcttacagctctttgagcatagcacattatactttatgagcaatttatctcctctggtcctcaaattcctgtgaggtaggaaaataagattcatcacttctacatctttaggtaaggaaattgagatgcagattgatggagtggatttgcccaatataagaacagcaaatccacggcccgctgtgaagtgccagagccgactgtgttcagagatgcctgggttccggtccaggctctgccacaaactgcgatcttgggcgggtcactaccagagcttaccttcagccattaaatcaggacagtaataatacctaccccacagtgtggttttgataacatatataaagcacttagcccagtctcccttatttaataatattcctgatgattaaaactcattccctcagctgggcaccatggctcacgcctgtaatcccagcactttgggaggccgaggcgggtggatcgtttgaggccaggagtttgagaccatcctggccaacaaggcaaaaccccgtctctactaaaaatacaaaaattagcccggtgtggtggcacatgcctgaagtcccagctgcttgggagactgaggcaggagaatttcttgaacctgggaggtagaggttgcagtgagctgagatcgcaccactgcactccaacctgggtgacagagtgagattctgtctcaaaaaaaaaaaaaaaaaaaatttagctggatgtggtggtgtgcacctgtggtcccagctactcagaaggctgaggtgggaggatcatttgggcctgggaggtcaaggctgctgtaagctatgatggtgcctctgtactccagcctgggtgacagaatgagacctgtctcaaagaaaaaaaaaaaaccagcaaaaaactcatgtcctcaatgaaaaaaaagaaatattactgatgatagtggcaagcatcagccactgtgtcccgtgggtcagagcaccccagttagtctgagttgtatctcagatgctcttgttgccttctagaaaatttgcacttcttcctagcaaagggctgcagctcacacagcataaagagaactgggctaaatcctgccttatggctaagtccagtgacactggccctgtcactttgcatctctgacttttgtcttctcatgtgtaacatggccaaaataaaaattaaaagtcagaggtggatggtggcacagattaacagaaagttgggagcaatgggtttctcaagagggagaccaactttgaataagagctcaaagagaaagtccagattatcttttcacaattacttttggcctatgatgtttccaccagctagggaacttagaaggacatatgtctactatgtttccccttcctctgtgaatccatgcttagtcatttgccccacaattatgtattaagcaactaggatgtaccgtacgctggagcctggagctgcaatcacatgagacccatagagctgtcctgagaatcgaatgccattagagatgagaagcgctttgtaaagtatcacccactggtcacctgctagggtttattattcctgctgttgtctggaaatcccaggtttatcaaagacatcttgttgcggctgaggaagccaagggcctaccttgtagacgaaggtgcaaacaaagtcaatgaagccgacttgaagcttagggagttcatctgctttgtttctgtccatcatgggctgtcatgggggagaaagagttaattgcactggacagtaagagaaacctaccctatctatgaagcattcttactaaaatcaaactgtaaactcatcatgtttccagacctgatgagcattttgcaggaaataggagaatagagaaacatgttaaagaacaccatgagggtgtaaccaaccaaatccagaatgtgggaaactgcacaaaaaaaaagacacactgtcttcagcaaataaatggcataccagaaaaaggccagagggtgggagggatggcagggcctgctacagattaaaagagacttaagagacattaaaaccagaggcagtatgctccttgattagatcctgatttgaacaaatcaactgaattctctttcttaatcaagaaaaatgaacagaaattggggattagatgatactgaagtatatgacttttgtgagtgtgttaatggtattatggttgtgtttatgattttgtccatatgaagctcttgtctcatagagatacgtactaaagtatttatggaagagattatagtggctgagatttactttaaaatactgcaaccaaaagcaaaaaaatgcactggaaggaattgataaaacaagaatggcagactgctgctaattgttggctgtagctgatgggcactagagttcactgactattctcaatatatttgaaaatattacaaagagagagtgagaacgacaaagcccatggggcccttcacgtgtttcttcatgacaggacctgctcctcccagccttctactctctctcggctcctgcctaagcctgccgtggtgacctctgcatccttagcacactctcacaggtttagcctatccaggtgtcaacggtttgtccccacaatgtctctctcttttacccatcctttccaaaccctgctttacttcccagctttgccttcagggacttcagggaaacttcgggctgctcttccgatctccccaactgcgcatctccatgggaagctggctgactgtctcagccaagttaactttcaatgttgacaggtgcacaacttgctcactctgtgctgttagattagggtcaggggaggtggatggacttctagacctttgaaattgaaagggcaatctaagtgttggagtccacttgccaacctctagggttgagtgagctaaggacacatttcccaaaatttaggagggcttactagttagagcattcattgcaggggcccacccccagagcttctggttgggtagacctagggtgaggcttgtgaatatacatacctaacatgttctcaagtaatgaggttgacagtggcctggagaccacatttttagaaccactgcattaggaaaaggtcatctttatggtaaagtcacacatctctccatcatggcgaggtcatatctaggtcaggatggagcacacacacctaacatcaggctgacatcccctgtctactcacaatgggattctgttgcagcaccgtgcgctccaggtcaccttgttcccagaattcagcagccaccagcagagctacctgcaacagacagaccctcacacacgcagagtcagagccccagcccaatcccctacccctgctcccaccccacttgcaattccaaatcaacaaaaaggataaacccatccctgccctgccaccctcacttttgctgtcatcactggagagacgtaaaatgattcccatgtcttggtagaggaggatgggacacaggtgagctggttctggagctgggctgagagagtccaagcctcatgacctgatgcccccagtactgggatgcccctcctcttgggtcagcaggagttcatacctggctctgcacctcccagggtttggtgatggctgagagatcacaggcggtcatcatcatggccctgggcacacaggacaccctctatcagtccagggccatttaagacttcatgtactggttaattccatctctctcacctttctccacccccactagtaggtgactttgtctcattgtgaggaaagggctcacccccattgcatccaggggttgggctttgaaatcaaacagggttagatcctgcctctgtcagtgatcagaggttggacactgggcaactacaccaacctctctgagcctccatttccctgtctgtaatgataatcgtaccttactcacaaaacaggtataagattaaatgagattgtggttggagaaatctaagtatagtgtctgaacatggtatatgcataaggaacatgtactgggttttcttctgtatcaagcactgttccagggactgtacaaacatcaatttcatttaaatctcatcacatcttcagagtccctttgctcttttctactgtagagaagtgtttctcaactttttttctcatcattgttccctgccccaactgccaacgagcctttttagatactttttcagtaattgccccacgatgagcttttaataccacagatatgctgtccatctgtttggagaaccacaggccattgtaatagctaagatttgctctcctacctcaagaatcactttttgctccattggaggcaatatactccatttttctatcagtcagttagcttttctgatttaggagttttgtttaatactaatagatttctttctcttctaggccatttcctcacctggcagaaactctcacccaaaaaatttaaaaggtaaaaaaaagaaaaaagaaaacatatggtgtaaagagaactgtgaacagctgtagcaaagaggccttgcattaaggcttggaaagggccaggtgccgtggctcacgccagtaatcccagccctttgggaggctgaggtgggcggatcacttgcagtctggagttcaagaccagcctggccaacttggtgaaaccctgtctctactaaaaatacaaaaattagctgggcatgatggcatgcacctgtgatcccagctacgcgggaggctgaggcaggagaatcgcttgaactcgggaggcggaggttgcagggagctgagatcacaccactgcactctagcctgggcgacagatcgagactccatatcaaaaaaaaaaaaaaaaaaaggagtggaagggtgcaggtaaagaaagtaggtagaaagagttcaaaggtaaactcttaagggagtgtcccactcatagaaaggcaaggcaggtattattacataggtgggtacaacagaaaatagaaagggaggggacacggacaaagaactggagcaagaggagggagcaaggggggtggatttgagaaaacattttagagcaggtaatcctggtaatccagggccatgtggcatgggccctaaattccatgccagggagtgcagactgtatctagcaagcagtggggaacggttgaaggttaaaggcccaattgtgacctcttcagagctgtgctgcaggaaggcagctggcaggactagtaggatggagaaggaagaaaagagcaggatggagggggatggggtgctgcagtaattcagcaggagggcaggagagctggtctgcagcaacggctggctgcggcggggtgagaccaatgggcaggaactggggagagggaggagtgagagaaggctggggctctgaacctaacttgctgcttggataattttacaattaatcagctgtgtggggcatattttctataagccagtctgtgaggctgtaagagttactcatggaatattaacaagtttaaataaaatctttaattatgggcctggcacagtggctcacacctgtaatcttggcactttgggaggctgaggaaggaggatcacttgaggccaggagttcaagattaacctgcgcaaaatagtgagaccctgtccctatgaaaaatacacagattagccaggcgtggtggcatgtgcccgtagtcccagcattttgggaggctgaggtgaggggatcgcttgaacccaggagtttgaggccacagtgagctatgatcatgccactgcatattttaaattatgtaaaccctcagaaattcaaatagctctttaagtaagctttcagaagtgcatacatttcttagaaacacctttatgctttataataacctcagaatacatgccctgtgctttaataagtgctgtggacatgtttacttactgtcagataggttgagcaaataaatgctcagctatgcatataagagtcactggctccctggtggcttcaggagggcactggatgcttactttctttagctggagggatcatgtggaaaacattcccagtggttgcagaaacacacctaagaattttatagacagagatttgctgtgtgcatgggatgaaggagggacaccaaggtgccagaaaagccaattcgagacttgtgccctaaagatgaggcttcacattcactccagcacctcccccttatatgcactggggtcccaagtgctgtgctgggcacaggggatccagaggggcctgcagggaggtcatagtcactcaaggaacacagggcaaaaaaaaaaaaaaaaaaaaactgtcatcacaatatgctaagtagaatggcagaaaaaggtccaaggtgaaaaaagaagaagaaagaaagagaaagagaaagaaagagaaagaaagaaaaagaaagaaaggaaaagaaagagaaagaaagaagaaagaaaggaagagaagagaagagaaaagaaaagaaaagaaaaaaagaacccaaaagtgaaggtgactagctcagtccaggtgccatctaagaggtgacaatggagcaaaggccttgaggggtacataggagccctctgtaatggacagaatgtttgtctcttcccagtcttatatgtggaagccctaacctttaatatgatgctattagaagacagggtctttgtggggtgctgaggtttagatgaggtcgtaaggttgcagcccccatcgtggggtcatgggcttcatcaccatagaagaacacacagggaaagtggtctctgctggctaggaagaggctgggctcacatggtccatgctctcagagatcttgcagatgtgctggggaattgcacatttatcccacacatgcaggttaacatgtaaacaaacaactgctctgaaggaaaggacttccattcttggagaagacatgagaaagagaaactgactgaggtctgggaggtcagggagggcttccctgagagagtgcctctggagctgataactgtaggatgtgtaaccatttacttgctaaagaagggagtgggagaaacacattccaggcagaaggatcatctagtgtgcagggcctggtagaaggaagccctgcacaaagagcttaaaggttgggggagctcagggagcaggtgggagacctggtaagagaagctccacagaggagcaggggcggcccatgcagagcccaggcgccgctgcgaggggatggttttcatgctacgagcaacaggaaaagccatgggagttagaacagaagggtgacgtggccacatttgtatttcacagaaatcactgtggcttcagtgtggaagggacaggagcgtacacagggaacccagttaggaagccactgcaggatctggacaagagatggagctggcaataaagagaaatgtccagacagatatggcacttaggaagtcaactcagcagcatttggggacagattagacttgcaaagtgaggaagagagaggtgtcaggatggaacagagtaaaggacaacatggttataatgcagaaagaagcaagagtatgccacaaaaatattgtatgctcagaaatgtgaaccttatgctctcagtagacgaactgtcaagaggaggggatggagttcaataggacaacagtgcaaaattccatgcagggctttggaatcagacagagctgaattagaccttccatctcctccccacttgctgtgtccagggcaagcgacttcatgtctttgagtcccagtctgttcgtttgtaaaatgagatattcatgttaggttggatcctatgaaattctgattttgttagtccaaatcagttaaaattcagcagtttcctatgggtcaatgtaatatatcctttttaagacttactgtgatgatcacataagatgcttttgtaaatgcacccagtgtcctcatcttcattatcagcacctgcattcatctcactcacgttctgggtcaccctcgtgtgtagagctctcaaaagcaagctgagctcttatccgcctggaccatccccaaggcaaatgtttcttcctgaaacatttggctccttggctgtgagtttcagtggcacttcttcctgactcctggccaactttcaggaaaagcattccagccttcctcttagccagccctttcaggacacttactcagaccctccctggaattacatgtgtctggagggtacagcaggagaccctgccggggaaggccttggaggagcctaagaaagcagtgggtgtgcaggcaagggctggtgtggctgagtccaagtccttgatgctccacaaatgcctgcgtgatgccagctaagtcacattgtctctctgggcctcactttcctcacttgtaaaacactagaccaggaattggcaaactctttctgtaaagagccagacagtaaatgtttgacgttttacagcctacatagtccctactgcaaagactgagctctgccactgcgatgtgagagcagccgtagataagcacagcatggataagcagggccagctcgtccattcaacagagcaccgagggcccacgatattctccagggcccatgaaaatatttcaatttctttcaagatgagcaggaaaaaaggacataacaggaatgaatatgtaagaatgaattcagtctggattatatttgtcttcataccaacacaatcataaaatataatttgtatttacttatttacttttatggaggaaggaggcacaaagacaaaagtgcctaggacccatgaaagtcagaatgtggccctctgtaaaagaatacagctttatttatggagactgaagtttgaatttcttatgattttcatttgtcatgagatactctttttttttttttttttgagaccgagtctcactctgtttcccaggctggagtgcagtggcatgatttaggctcactacctcctctacctctggagttcaaacgattctcctgcctcagcctcctgagtagctgagattacaggtgtgcgtcaccacgcccagctaatttttgtattttcaatagagacagggtttcatcacgttgaccaggttggtctcaaactcctggcctcaagtgatccgcccgccttggcctcccaaagtgctgagattacaggtgtgagccaccacgcctggccatgaaatattattctgttgactttttcccccaaccatttagaaatgtaatagccatccttagctcatgagccatacacaaacactgcagtgctagaggatctgtgagcctttccaactcatggtttggtcagactgtcagaagcaaaatctggaattaaggggaaatgtcaagagtttgatgaagaataggaagtcacaccctcactctagagtttctataatatcttgaccctagattaaaattactgaagtagtcctagctacttaggaggctgaggcaggaggatcacttgagcctgggaggttgaggctacagtgagctatgatcatgccaccacacttcagtctgagcaacagagcaagaccctgtctctaaaaaaaaaaaaaaagaagaagaaaaaagtcaaagtcaattggtgtggacctcccaccacaggaagcccgtggacataagcactccaagataatcaaaacacaggaagggagtgttgggtttttcctcacaacaagcaatcctgacaccaactgggtgtcttacaattcatttcaactctgatactaaattcctatagttagcatcacattctacaggttaaagggttcagtcccacaagactgcctcacttcagaggccagccacatgtatggggtccccaagttacctacccttctgtctgacttggcaacaaagttgaaatgtgtccctgcgttcgggttcagtaatttgctagatgagctcacaaatctcagggaaacactttacttacattttctagtttattataaaggttacagctcagaaacagccaaatgaatgtgatgcatagacaaagttatgggagggggaatgcgtgccaccacctcgaagtattcaccaaaccagaagctctctaaaccctgctgtttagaggtttgtatggagctttttttgtttttaatcacagaagcatgattgattaaatcattatccactggcaattaactcaatctccagcctcttccctccccggaggctggggatggggctgaaagttccaagcttcaaatgaaggcttggtctttctggtgaccagcccctagcctgaagctgtctagggtcctgccaagagtcatcccatcagaacaaaagatgctcctatcactcaggaaattccaagggttttaggatctctgtcaggaaccaggaacgaagaccaaacatatatgtcttcttataccacaggaagcaccgaacaccactacctgctgcactgcattccacatactccagctcagcccccatgatggtccacaaagtaggcaccaccatgatcctcactgagcagatgaggaaactgaggtgagggagtaagtcacctgcttgaggtcacaccaccaataaatgaaagagctgagacttgaacccaggctgtctgataccaaagccccaagtgtgtaacagctacatgctacccaggtgtgaagaagttccaattatacacctaagcaatgggccccgagatggctttatagcaaacagctgggccaatttttgccccaggggatatttggcaatgtctggagacatttttgattgtcacagctggggaggggtgggggtgctcctggtgtctaatcctgtgcatccctcaaggcgcagaacagctccacagcagggttgccagccccaaatgtcaacagggctgagactgagaaacgctgcattacaggtctcccaatatttttcgttaaatccctacctaaagaattttgaaaagtgctaccttcttgcacatttttaagttgacatcttaaactattacaagtttaatattttcaaaggatctaatttatagcacattatacatactgactatttttttttttttttttgagtcggaggagcctcgctctgtcacccaggctggagtgtagtggcaccgtcagggctcgctgcagcctcaacctctcgggctcaagcagtccctccacctcagcctcctgagtagttgggaccacaggtgcgtgccaccacacccagggaaatttttattttttatagagacaaggtctcgctatgttgcccaggctggcctcaaacccctgagctcaagccatcctctcgcctcagctttgcaaagtgctaggattacacatgtggccactgtgcctggccatactgactttttaaaataaatttgttacatcattctttacccacaataaaagcacatgagcaagcttttctttaagagtctagagttttacatctttccttgtctctgtaaacctctatttccacttgacttccccacagaattttatcctaatattgtgtgtatatacgtgtacatgtatgtgcatatgtgtttctgtatatatatgtgtgtgtgtacactacatatatgcttgaaagtctttcattgatcgattttcataattacttgcaatcaattatatccatttattgaaattatgtaattaaaattttttctttgaccataagcctctaagtgttgaaaaattttcttttggattaagttattattacacaattaaataacaaaatatactacctatttttacaaataattattaaacactcaaagcacccttttttgaattcatctattaacaatatagggtggattttttaaaaagtattggtttatgaatgaatatttcttgttactagactggagtcggattcagcacctattttttgcccatttttcctcttttttttttttttttttttttaaccagagtctctctgttgcccaggctggagggcagtgcagtggcatgatcatagctagctgtagcctgaaactcctgggctcaagtaatcctcccacttcggcctcccaagtagcgtgcaccaccgtacctggataatttaaattttccaggacagagtcttactctgtggcccggctggagtgtggtggttccataccggctcactgcaaactccgcctccccggttcaagcggttcttgtgcctcagcctccacagtagctgggattacaggtgcaagccaccatgccctgctaattgttttttgtattttaatagagatggggtttcaccatgttccccaggctggtcttgaacctctgagctcaggcaatctgcccgtctcagcctccccaccatgcccagttcctatttttaaatttaaataagcatgttacaatacatccaacttatcttttatttttaattctaagaaaggtaaaggtacatggagggtatgtaggtagactagacagacagatgatgatagatgatgagagatgatagatagatagatagatacatagatagatagatgatagatagatagatagataatatgattctgttgagagactattgaccaaataaaaaagaaagaaaaaaaattgtaaagacagatgatagaaagaagacagtgaagtggattaaatcagttgctaccatcttcagtacgtattactgatgtgcctttgccctagtgtcatggtccctggacagtgatacattttctgaaagaagtaagatatttaaatgaaaaatctttcacctgctgcccccctataaaaccccacccactggctgggaatgggggtggggttcagggggagtgcctggcaattaaagttgtaaaaactcttgaacaaatagtctgggtccaaatagtctgggtccagtggttcatgcctgtaatcccagcactttgggaggccgaggtgtaagaatggcttgaacccaggagtttaagatcagcctgggcaacatagtaagacctttatttgtctctacaaaaaatttaaaaagagtctcactctgtcacccaggttggagtgcagcggtgcaatcttagctcactgcaacctctgcctcccaggttcaagcaattctcctgcctcagcctcccgagtagctgggattacaggcacgcaccacaatgcctggctaatttttgtatttttagtagagatggagactccccatgtcggccagactggtctcgaactcctgacctcaagtgatccacctgccttggcctcccaaagggctgggattacaggcatggccaccgggcccagccccttccttagatttataatgccttaattataagaggctgtgacaccaccagtatggtggactctcaaacaacacaggtttgaactatgcaggtccatttacacatgaatttttttcaactgaacatggattgcaggatgcaaaacccatgtggggaggggccgactcttcacatccaaggggttttcagggctactgcaggacttgagtttgtaccaattttggtatactagggggtcctggagccgatcccctgagtatacccagggatgactgtatttcaaatagtccctccgtttggctgcccagaggtttttgtctctacgacaatgcaatgtgggaagattcaagaaagaatggagtttgcctttattttgtaaggtggggaagaatgagagaatgctgtgcctactgggctgcttctttctcaggaagattaatattacaaaagaaaatgctgattcccttaaggctatctatgctgatatacatcttggaaggacatgagttcccagaggggtatgtgtgccgtcagctgaagatgcctacgtaaggtcaccttgactttgacaatgattgagatcctgctcctggcttttttttttcttttaaaattaaacataattcctttcatttgatgtcatttctttgcaaatctgtaagatattccattgtatgaaagtgttatcgtttatttaacctggttccccattgctaggtatttcgattgttttcaatcctgtttgtgttacagacaatgctgcaacaaacaattctgtacatacacttggtgcacatgtgggagaatatctggaggggaaatcctggaagtgggattgctgagtcaaagggcatgagcacttacagctttgataggtgttgccaaatcgccctctgcaaagactgagcctgtttacactcccgcatggggaacgaggtggccctttccctcactctgcccgacacagtatgtaagcaaatgttttcatctttgacaataggagttaacaattatacctcattgtagttttataatcaccgtcttttcataggtttatatcccactgtaacttttctgggaactgtcggtttgtgccttttgcccattttctattggattagtcttttcctggaatcatattaacactttattcactgaggaaattagctctttttctcttagaagtggtgcaaatatttacctccagcttatcacttactttcctatttagactatgtgtttttgtgtgttgtacagaaatccttaatttttcatagtcagatttctccatctaattttatgacttacgattttcatgtcatattttatttatgtttattttattttgttttatttatttatttatttatctatctatcttgagatggagtcttgctctgtcacccaggctggagtgcagtggtgcagtctcggctcacagcaacctccacctcccacattcaagccactctcctgcttcagcttcccaagtagctgggattacaggcgcctgctacctcgcctagataatttttgtatttttagtagagatggcgtttcaccatgttggccagactggtctccaacttcagacctcaggtgatccgcctgcctcagcctcccaaagtgttgggattacaggcatgagccactgtgcccagcctcatgtcacattttgaaaagctcgctctgaaattttttttttttaggttttttttttattattgttattatactttaagttttagggtacatgtgcaccttgtgcaggttagttacatatgtatacatgtgccatgctggtgcactgcacccactaactcgtcatctagcattaggtatatctcccaatgctatccctcccccctccccccaccccacaacagtccccagagtgtgatattccccttcctgtgtccatgtgatctcattgttcaattcccacctatgagtgagaatatgtggtgtttggttttttgttcttgcgatagtttactgagaatgatgatttccaatttcatccatgtccctacaaaggacatgaactcaacattttttatggctgcatagtattccatggtgtatatgtgccacatttccttaattcttccatgcttttttcgtgctctcttttctttccctggttatttaaaaatttttattacatctggagtttattttggtataaggaatgagatagagatctaacttcatggccatcccattgtcccaaaaccactgatgaacttacacctttctccactagtataaaacccactttgaacacagacatagtccttaagttcatcccattgatctgaacgacttctcctgcctaggacagaactgcctttagttctgctggtcaccattattactcttccatgtcagaattttctggctattcttttttatcttttttctttttctggttattcttgcatactcatttctcataagaatttttcaatcagcttcctaattcccccagaataaagcagggtttttttgtttgtttgttggttggttgcttgatttgttttggaatcacccttaaatgaataaattaaaattagggagaatagacaactttctaaatcaagtccccctatccaatagcagggtgttcctttcaatgatttagtccttctgctgagccattttgaaatgtccagctatggaagtcaaaaaaagaaaaacattaggaaaaaacagaagtcagctgggggtggtggctcacacctgtaatcccagcacttttaggaggccgaggtgggcggatcacgaggtcaggagttcgagaccagcctgaccaacatgatgaaaccccgtctctactaaaaatacaaaaaaaattagccgggcatggtgtcgcatgcctgtaatcccagctactcaggaggctgaggcaggagaagcccttgaactcgggaagtggaagttgcagtgagccgagattgcattccatcctgggcaacagagcgagactccatctcaaaaaaagaaaagcacaagcaaaagtcaataaataaataaccaaaatgagatactgtctggcaccagtcacaatggcaattattaaaaagtcaaaagaaggctgggtactttggaaggctgagacaggcagatcacttgaggtcaggagtttgagaccaatctagccaacatggtgaaaccccgtctctaccaaaaaatacaaaaaaatttagctgggaatggtggcgggtgcctgtagtcccagctactgtggaggctgaggcacgagaattgcttgaacccaggaggtgcaggttgcagtgagccgagatcgtgctgctgtactccagcctgggtgacagagtgagacaccgtctcagaaaaaagaaaagaaaagaaaaatcaaaacataacagatgctggtaaggctgtggagaaaaaggaatccttatgcactgctggtgagaatgtaaactagttcagccactgtggaaagcagtttggagtttcctcaaagaacttcaagtagaattaccattcgacccaacatctcattactgggtgtgtatccaaaagaaaacaaagagttctaccaaaaagacacatgccctaacatgttcatcacagcactattcacaatagcaaaacatggaatcaacctaggtgctcatcaacggtggattagataaagaaaatgtgttccatacgtgccatggaatactacacagccataaaaaagaacaaaatcatagcctttgcagcaacagggatggtgttggaggccattatcttaagcaaattaacacaagaatggaaaaccaaatactgcatattctcacttacaggtgtgagataaacattacatatacatggacacaaagatgtcaacaatagatactggggactacacaaggggagacggaggagagtgtgggccagaaaaccacatactgagtgctatgctcactacctgcgtgaggatcgtttgtaccccaaacctcagtgtcacacaatatacccatgtaacaaacctgcccatgcattctttaatgtataataaaagttgaaattataaataaataaatgtggctggacgtggtggctcacacttgtaatctcaacactttgggaggccaaggagggtggatggcttaagctcaggagttcaaaaccagcctaggcaacatggcaaaacctgtttctaccaaaattacaaaaattagccaggtatagtgcgtgtgcctgtagtcccaactactaaggaggctgaggtgaggggattgcttgagcctggaaggttgaggctgcagtgagccctgatcgccactgcactccagcctgggcaatagagcaagaccctgtctcaaaaataaataaataaataaataaataaataaataaataaataaaatgtccaggggggcagctcctggccagtctatgagtaactgtgggctgagcatgcccccttgttcagtgaaagcagattgcactgctcccagaatcaggggacctttgtgggaggcctggttggacaactgcagggctgaaggagtggcaacttgctgctgccccccccgtttccggagcctgtcccagtggtctcctcttctctgttgcagacatttgcaatgcttgtgacttaatcaagcctcatttccacagaagcatctggggataaacaaataacccaatgcttcctaggcaactagtcagccttgtctcccctgcaacttttcctgaccattgccttcaatgcccaggacccatcacagaggagccaggggaccatttggcttgggccacatattcataaaaggcctcaaatttacacttctcaccccattgtcaattgaggtgaatcatggaagcacactgagaaaactgaaaaaagacattcaccagacaacttaaatttgagtcccattaccaaccatgccagaccatgcactgtaaatttcataccaaccataaccaatttgtgactagcacagctatattgtgggatattgtcctatgtaaaggaatacgttaaaaattaagcctatatgttttgaataacacattaactatcactcaaactttaattcgggccgggcatgatggctcacgcctataatcccagcactttgagagacagaggtgggtgtatcacttgaggtcaggagtttaaaaccagcctaggcaacatggcaaaacccggtctcgactaaaaatacaaaaattagctgggcgtggtggtgggtgactgtaatcccagctactaggcaggctgaggcaggagaattgcttgaacctgggaggcggaagttgcagtaagccgagatcgcaccactacactccagcctgggcgacagagcgagactctgtctcaaaacaaaaaacaaaacaaaacaaaaaccccttaattgctatagtgctttccgttgtatcaaaaacttaaaagttatatcagtttaccacccaaatcttagatattatgattgaactacttcaaataacatatttttttattcagataaataaaacaataatacactgtcttgcatttttagtgctaaaataaagattaaacatgtggcttgtgcaattggaatttggcataacttcatttttttcatatgttgaaggcctccaaaatgaaatagtcccaaggcttgttgagggcagcaagagctgtcagtgcatctcgcctcatgatcctaagcctaagaggatcaggttttaaccccatcccaactcacataacgatttccttccgtgtctgctccagcatcatgtactgtgtccactcctgttcactctcatatgtcttagactgatccacgatcttttggaacatcgtcctcttcctacaaaacatatcagtctagtaaagggagcaagtcttagaataaggcaacacctgagctgctaacattggctgattcagatggagccttattaaatcaacaaaattcacaaaacaaggttgaaagagccaaggcccaggagtgaagacctaggtttaacctaagtctctgccactgatttgttatctactcttagcaaatctcttgtcctgaatctcagtgttcccatctgtacagcgggggtaatgatatctaactcacaggcttgtagcaagaatcaatgtgtccataacacacgtgttgtgcctgacacatagtatatgctaaattaattggaactatgatgtttgttattattattgttattatattgttgctgggtgcagtggctcatgcctgtaatcccaatactttgggaggctgaggcagaaggatggcttgagaccaggagttttagatcagcctgggtaacatagtgagaacccatctttacagcaaattaaaaaattatccaggagtggtggtgttcctgtagtcccagccactcaggaggctgaggtgggaggatcccttgagcccaggaagcagtgagctgtgatggtgccaccgcactctagcctgggcaacagagtgagatcctgtctcaaaaaagaaaaaaaaaaaatatatatatatatatacacacacacatatatatgtgtagatatatgtgtatatatatgtgtatatatatgtatatatgtgtatatatgtgtatatatgtatatatgtgtatatatgtatatatgtgtatatatgtatatatatgtgtgtatatatgtgtatatatgtatatatgtgtgtatatatatgtgtatatatgtatatatatgtgtgtatatatatatatgcatacatataatcattgttgcttttactattagaatgagaagatataccaacttgaaatacagggcgaggtctgtggcaatgattgcaatgtccatcatgtggatggcatgctcatgctgtcgacgattgaggttttgaaagatattcaggctctaaagaaaaaaagagaagcgagatgggagagaattgatgctggcagtaaagtcacccacctaccaatggccaccccagatgatggcagaggcagcccaggccaatgggaagaatgctccctgggcacactcaggctccttgtgaaatagagcctctgatccaggccccgcggcctgtagacccttggccctcatcctacctcgtctctgagcagtgttttgccaaactccaagtggtgtctttccaagatagaggacccatggagcttggccagtgggttctgggatctgaatgagaaagagagagaatcaatatggagtggacaatagaaaattaggactaaacatcaagtctcctgactcagtcttcagccttctccacaagtgattccgagttacttttgggtcgtgaactcattagagaatctactaaatagcatggaccccttccccagagaaagccacaaacacacacaatgccataagggattttagggacattagcactgggccatgcttcaagatcatctagccctgattcttcacatccaagtcttgaaggaaacaactgaatttccgcaagccgtgtatttattcatttctgcattcaataattatttgttgagcacttgctatgtgccacacactgtgctaagtatttagattctcaaaatgtaaaatgtaaacccaatctctagccccagagcagcatgaaagtattgagaagactcagcagcatgaattcagagcttgttaatgacttacaggccatcggccctgagcggagactcagttttctcatctgtaagtagggataacattagcccctgctctgcccagcccactgggtggttgtgaggatccaatgagatcatggttcaaggactatgctttatgggctgtctgaaatataagctctgtaaggacaggagctgttttgctcatcagagcaccttttttgcctggcatagagcctaccacactatattagaagcactgtaaatacgagatgagtgaatgaaccattactggttattaacatcttggctcaaattagtgcagcaggtaggacaaggaaggagacaagtacaggagtttaatgcattcattttctatggctgctataacaaactgccacaaacttaatggcttaaagcaataaaatttattattttacagctctgtatggagtctgaaatgggtccttagggctgctttccttctggaagctccagaggagaatccgtttccttgctcttttgagcttctagaggccacctgcattccttgcttgtaggccatgcctccatcttcaaagccagcagggtagcatcttctttcctctctgacctcttgcttccctcttataaggaccattgggactacatggggcccactcgaatgaataatccctgtatctcaagatcctcgacttaatcacatctgcacagtcccttttgtatgtaaggcaacatattccccagctcagggatttgagatctggacatctttgtggtggtcattattctgcctgctacaggaggagacccggatcccaagggcagaaggcggtgggaagctgtggaccacaagacttccctgttggccagtgagtctgcctgggagccacacagagctggataatgaatccggagggttgggtgtggggagggaggctgactcacttcatctggtagaggttattggtgcctctgtggtcaatgtcatggcagaaagcagcagtgaccatggccaaggcctctaggtccgtgaagtagcgcttcagctttcccgtctggaagggcaatcagagtgcaaatcattccttttgtgtaggggctggaagcagggctgaaaaggcgggtgtaaggaggagggcccagaactaaaaaactcatgggtctgatcttggctgtatcctggctccagaggctgaccagaggactgcccagggctgaggggttttttggatatgggactttcagtgctagaatggggaaagtcccaggtaaatgggaacaactggtcaccctatttctgagttgaccttagctggtctcatctccctctgaacctcggtagcccaatctccataatgagggtcgagcatattggatcagatgaattttgagaaacttgtagaagtcaggttttaggatttggagagtttctgaacatggccaggctggtaaagcaaatcttccaaacgtggtctactggtttaagcacagcctggaggaatccttccctgggattttgccagacacttaactccttgttgatgctgggtgttgaaaccaaatgtgggaaagtgctctggagagctgatgctgactttatgaaagcaatcactctaagtggtgttcctgtcaccctttaaggtagcctggtcagaattcctgcttccgggccctagcacctactctggcctgaccatttcagccaagggggaagggatgatgttgaggaagggcagggatttgcatcatgatctggatggggaaataacttgaaataaaacataaaagtctccgaaccctctcagtgaaaaatacgaacacaaatacacaaagataagtccatccaaggatattgtggcactgtttgtaatagtgaaagattgaaaagacttccaagtccaacaatagaacactatgcagccacaaaattgtatcatggataagcctcaaaaatgttatgttaagtgaaatatgccagacacgaaaggacgaatactgtatgatttcacctcactgtatatgaggtgcatagaatagtcaagatgaaagaaacaaaaaataagacagggccaggcatggcaggtcacacatggcagcactttgggaggccaaggtaggaggaccacttgagcctaagaattcaagatcagcttaggcaacacagccagaccctgtctctacaaaactaaaaatttatgtggacatggtggcacatacctgtggtctcggctacctggtgttagtcccaactgcaccattttgtaagctccccattattttgcagaccttggtcaaagtgaaacatttcatgggggtttgggtcgggagaaacagccttcctaaccacctgaccacaaggcagacaaaggcccaactaaagaaacattcctatcatatcttgctgggcaaaagtccaagaaacaccacaatggcatcccaccgagacaaaagcaaaaccgcctcatcatgagaacatcttatcaatagcctgccaggcaacaagccatactgcccagacccctcccgcccatacctataagtaccaccagcctgtaagcagcggtgggctctggcattaggctggttcctacttctgtagattttatgctgggcgtaaagcctgcatttgctcttgagccgccctctttctgtgtgtgtgtgtgtgtgtgtctttctttaaccctcgccttcccttcaaaacctaacatgtgggagggtgaggtgggaggatcgcttgagcccaggaggtcaaggctgcagtgagccgtgtgttctcagcactgcactccagcctgtgtgacagagcaagatcatatctcaaaagtaaaaaaagatctaagaggatagagattaaatgttgcctcctctacaatttcttattaccaagagactaaaaatatttgggactgttactaaaaattttctgtgccacagtgacagattgtactatggggaactacatgcttctagaaattattattcacagacgattgatctacagattgctggtgtgacagacagttcacaatttttgcttgcttcctagtgttcactggaaattaaggtcactaagggttaagaattctaattaatataaggatatattaacatatattaatatatatttctttatttagaattcttaacacataattaatatgttatttataatatattaataactaataattaatatattattaataaaataataagggaaacaattctataagcaattatacaagagggcaaaaactgcttttggtaagaaaaagctataagatatgaggatgttttattttgttaagggtgaaaagagaaacttttgtcctaatgtaggataactggttactccaaaatgagaagaggaaaaagtataggaaaaagttgaatggataagaaagttgtagaaggcttgtggaagataaatcttgtgaaagtaattgtatgtgtgatgaagctggctaagattggaagaaaatggctgggtgcggtggctcacgcctgtaatcccagcactttgggaggccgaggcgggcggatcacgaggtcaggagatcgagaccatcctggctaacacagtgaaaccccgtctctactaaaaatacaaaaaattagccaggcatggtggcgggcgcctgtagtcccagctactcgggaggctgaggcaggagaatggcgtgaacccgggaggcagagcttgcaatgagctgagatgtgccactgcactccagcctgggcgacagagtgagactctgtctcaaaaaaaaaaaaaaaaagatcagaagaaaattgtttgaagtttttctaaaattttgaaattaatgctatcttgaacattgatgtcaaaagtacactgatgcaaaactagaacttggacctctcttttaaaacaacaaattttctttgagtattggtctgctgttaacaggaaatttatcttttaggtaattgacctaggaaacaaagattctgtgctttaccaaattaatttcctgtactccaggttgcctttattaggtttttgatcacttaagaaaactgttttctttattaaaagagctaaggtctttctataagtatttaactttctgtatttttatttatttatttattatttatcttattttatttttgttttgagacagagtctcgctctgtcacccaggctagagtgcactggtgcaatcaaaactcactgcggtttggacctcctgggctcaagcaatcctcccatctcagcctcctgagtagctgggactactggcgcatgccaccacactaggctaaattatcttattttgggctggatgcagtggctcatgcctgtaatcccagcactctgggaggctgaggcaagcggataacttgaggtcaggagttcgagatcagcctcggcaacatggtgaaatatcgtctctactaaaagtacaaaaagttagcttggcccggtggcacgcacctgtaatcccagttactggggaggctgagacaggagaatcgcttgaacccaggaagcagaggttgcagtgagctgagatcatgccactgcactccagcctgggtgacagaacaagactctgtctcaaaaaaaaaaaaaaaattcaagcatttagaaacttcccaaagtcatattcattttttttttttttttgagacagagtcttgctttgttgtccaggctggagtgcagtggcacgatctcaactcactgcaacctctgcctcccagattcaagtgattctcctgcctcaccctcctgagtagccgggattacagacacaccaccacactaggctaatttttaaaatatttttggtagagatggggtttcaccatgttgggcaggctagtcttgaactcctgacctcaaatgatccacctacctcagtctcccaaagtgctgagattacaggcatgagccactgcgtctggccccaaaatcatattctaaattaagtatttttcttgactgcaaattaactttggaatttttcagatgaacccttagaacatctcaaaaagatatctcttcttgtaaaaagagagacattaaactaattaggcttattttatatattaaattatatgggaagcattgtcaaatacaattaatgctaaatcttcaagttgtattctaaagatgtgttattaatatgtgtttcagaaactgtataaaattcatagaaatctagtattcctggtataacactatcagtcacaattttagttattgtcttaaaatgtttgcaacggaaataaccaaatttccttgtcaattgtgtcattattgtaatgaactctcatgagatctttaaccatgaccatgtaaagtcttgtcatccacaggtggtttttcactctgctactttcctgagcaactctaagcctaaagtgtttcttcttcataagatcataccattggactggggaagaatttccagaattccagtgaagaaactggttcataaaactgctaactcagtattaagcagaataaaaaataattgaaaattaaaacaaatgatttggcagatttttatgctaagtcagccagtactgaaattggtgagatatacaattttaatgaactccaaacattgatccaagtcaagttacctatgataacctatttaataaacagtgctatgcacctgaattggagaaatgaaattggtatttaaaaggatgtaaatccaatgttaagtgtggactcataaggagtcccgatggcctcctcatccttcttgagtccttaaagcttccattattagattactgcactccatgactcatcatggaagagataaaatgacagaaatgatgacaaaatagtgacaaggtgactgctctaaaattgctaaaatgggctgggtgcggaggctggtgcctgtaatcccagccctttgggaggccgaggtgggcagatcacctgaggtcaggagttcgagaccagcctggccaacatgatgaaaccccgtctctacaaaaaatacaaaaattagccaggggtggtgacgcgtgcctgtaatcccagctactggggaggctgaggcagaagaatcacttgaacctgggagatggaggttgcagtgagccgagatcacatcgctgtactccagcctgggcgacagagcgagattccatttcaaaataaataaataagtagaattgctgaaatggtttcaagaaatgtttggggccaggcgtggtaactcacacctaaaatcccagatctttaggaggccaaggcaggaggatcacttgagcccaagagttcaagaccagcctgggcaacatagtgagaccctgtcttttcaaaacaatttaaaaattagcccagcatggcagtgagtgtctgttgacccagctacttgggaggctgagatgggaagattgcttgagcctgagaggtcaaggctacagtgagccataatgacattactgcactttagcctaggcaacagagcaagaccctatctcaaaaaaaaaaggaaaaaaaaagtttggtttgtcaaactcataattctagcaagacaataaaaatctcaggcaacacatttccagcacccactggatcatctgaacacttacaaatggatttcacttaactgctcctttagtgcttcttttctggttttatagaaccgttcccatacaggaaggctgatgctataacactacttaaaaagctattagaaaatattttttcactgagtttaatagcttgtgcctataattccagcaacttgggagactgcagcaggaggatcacttgaggccaggagttcaagaccatggcaacatagtgagaccccccatctctctaaaaaacaaaataaataaatcagccaggcatggtggtacttgtctgtagttttagctacttgggaggctgagatgggaggatcacttgaacccaggagtttgaggctgcattcagctatgatcacatcactgctttccggactgggcaacagagtaggagctcaaatcaaaaaaaaaacttaaaaaaatgtttttcccttgtgaggaattcttgagaaaatctccagagacttttctggaagcactgtcaaataataatgctaagctttgtttgagttatagtctatggatatgttattaatatgtgtttcagaaattgtatgacattttcttttcttttctttccttttttttttttttttgagacaatgattcactctgtcacccaggctgtagtgcagttgtgccatcacagctcactgcagcctcagcctcctgtgttcaaaggatcctcctgccttactccctgagtagctgggaccacaggcgtgcgccaccatacctggctaatttttgtactttttgtagtgatggagtttcacaggctgacctcgaactcctgggctcaaacattccacctacctaagcctcccaaagtgttgagattacaggtgtgagccactgcacccagcctgtataaaatttatagatagagataaagagatactcatttcactagacacatcgtaaaaccatttacaaagatattttaaacacaattgcattaggcaaagctaactgaatcaattggattgccttggtcaaaggtattctcaattgatggcaatcagatccactcctgctgaaaaacagattggccccatacgaaatagttacaggaaggtgtatgcccctggtaagagaacctcatttatcttccacttttataaactctgacgtgactcagtagtgcagaactttagtgcattatgccaaagcatattttcatcaggttaaagaagccctttgtgacccaccagttgatgacaaccagatctttcatgatctagaacccaaagattaggtcttttggaaattacaccaaaggaagactgctcttgaactccattggacgcgaccataccaagttcttctctaccgcaaaactttagggccttgagtcttggatctacatctctcaattcaaaaggtccctccagattcctggaagtatacacctgttggactccttcgggtaaagctaaccagggaaggttttccacagaaacagatggcattctagacagggatcatagatcaagacttctctgccatcatgaaggaaaccgtactctgacctttctaattaataacctaatcactgccaaatatagaaaacccatctaagtgatgcctacaaaaggtatatcctgctttcaggtattgtatagtcaagacctggagactacctatgtgggtatgagtaattgcttgtaggatgtcactggattaaatccagtaaggtttctttccactaaatatggttatgcaaccttacagtatgctatgaagggactacaaaaaagtaagtgtctcactggaccctgttcaggagctatgcagacttatgagtggacagacttaactgaactctgttcatgcatcactagctggcctcttttccagtcccaagggcttatattgggtttgcttactctgttctgtctccctgatggttcagaacttgttatttggccaggctcactcatgctcccagatagcttgcccctgaaagttcccataataactcccacaatcagaggccaaagcaatcaataaccagaattactaatgacctcaaaatagatgaatataagttagtgtctactgaggaaagtttccaatggggctcctgggggctcactcttgctggtagaggggtaccagttatagggaatttaaagctgattatacattagagggaaatcttggattttatagtcaatcaggcctcccagtgttcagacaggtagaagcaactctctaaaaagtggatgagaagattcatggaaacacctaatggaacatgatgcagctttagacctcctttttgtccttgttggggcttgtgtatgaggctgaacaaaactgaatgttgcacttatcttttctctgattttagtactacaggaagcttaatttaaaggtggctgatactgctgtttctctagacactgccacaatttaaggaaatttcagaaaatttctctggggaaaagaacacatgatgtgtttatgggagcagctaacaggtggtttggaggcatctcgaatggtgaatggcaaacttttctatttcaaggttttctaatctttatttatttattttaagtggatttccacattactatgacttgcattgccaggctaactacagaaatggatacctctttataacaggccatttaaaaatgaaatatgttcctaattgtcattatgcccccaagcaaagactataaccatgaccaattgaactgttgaatttttttttttttttttttttgagacagagtctcactctgtcaccaggctggagtgcagtggcgcgatcttggctcactgcaacctctgcctcccgggttcaaggaattctctgcctcagcctcccaagtagctgggattacaggtgcccgccaccacgcccagctaatttttgtatttttagtagagatggggtttcaccatcttggccaggctggtcttgaactcctgacctcgtgatccacccgcctcggcatcccaaagtgttgggattacaggcggccctgttgaactacttttatacttgtgacatggttacccccaaataacctgactgaggttgggggtagcttgcagctttctttcactttttattttatatgcatctctattcttggaatccttttacactaagcccgtactgctttcacataactcttaaaagacaataaataaagaaagaagaacaacgctgttgctaccatgtagagtctgcatgagattgtctagtgtgatgcaagcccaccctaccagccccaccggccccgccataccaccagcagggagaacatggtctgccccacgttgaagccgtgccgccagttgtggtaggtgatcttgcggtagcccttactcagggagtacatgaaccgcaccagggcctgtgaacacatgcacatcagtgaggcaggacacacctgaaatggtctcatgagggttggaataacaaaaatatgaagaaggcatggcccatggccctctcttttgaggtttgaggtactctaaccccatcattggaccaggaggtgagagcttgtactagatgcaatcatgctgcgaaagtgctttgcaaatactaaatgctaaatactaagaagatgttgttgttgttgttaggaaacgaggtgagcatgcatcattcctctgactgagcttcatcagtaattcccgaactgtgccctggagagcaactatccttggagaagctaacaagggctctacagggaaaaaaaaaacaaaaacaaaaggactcttttatccagtggttctcaaacttgcgtgtgcatgagactcacttggaggacttgttaaaacagtttctgatttatcagagctgggagtgtgtgtgtgtgtgtgtctgtgtgtgtgagagagagagagaaagaggagagagagagagagaaaaagaagaatgtgaatttctgataagttcttaggtggtgtggatgtggtctggggtaacactttgagaaccactgctttaatcaaaatcaaacaagttcaggcaattctgcatatcatatcccactgcctcccacacataccttctctgccgtcccccatgaccctagactcacagcaaaccttagtaaggaatcctgcagggaatgagccctgtttaaatgggtttagcccacattttctgccctcatttaactataggacccattttttgcagcatatctattcccagccttcagggcttagtacctcagaacccactgcaagaaaccaacgcacccaaaacatcacacttcacaggacacagaggaacagcgtgtctcttttcttataaatgactcatctgtgcaacatgactaattctttaaatcctaaatactgagagtaaactctttttaaggtagtttacagattgagtcttttttttaaagcaagcaagaaagaaaattaaaaagggaaatcatatatatttgttttgacctcacctcttgtggaatgtgaaatttatccaccactttgagctcataatacatctgtattccacattttaccagctccagttctgttaggggtaagtcactgaagtgaaatttattaatttcgtatttatctgcatctggcagctccgcttgctgtataaggaatagagtcaggtgattaggaaacatgaagtgtttctgggtgcccacctcctgtccagccctgtccccatcctgggtctgctggaaggatcagaacagagtgatggggaacatgctttgcaaggagaaacccctgcatgctcaggagcactttgcacttgttatacatcggggctcgtgctgccccggttcagctcaccaggatctcagccagctcctcttcctcacactcccatggctccttcccatacacctctctggttttctgccaggacccaaaatggcaggggaaaaaaaataggttacaacatgcctccgcgtttccattcccatttatctccttcctccaaagtccttgcaacagaaccaccagctcaaagaggattccatttaacatccattgatgcacaaggtcctgggctttagagccatagagacctgcattcaaattcaagctctaccacttactagccgtgttattaatgcttctgatcttcagtttcctcatctgtaagttgaggataataaacatacttaactggtgaattaaaatttaattgtgaaaagtcattctcaagtaacatatgtaaaattaaataatccatataaagcacttagcacagtgcttggcgcatagtaagcactaacataaattaatgttgttgttgatagtttcattgttactattactgactgggagtaaggaggccttggacatagtcctagttcttcctctcatttactgtgtaacttgaggcaagttccttctctctctgggcctgtgtccccatgtgccagaggagggggaactggacccagttacttgctcctgatttcttgacccagagcaaaatttgttaacttgtaactggttcaccgaggctgtgccccgataggttgcacatacccattctttggctgaaactgtggactgagtcaagcaaaccatgaggcaatttatttaaacgggatgttttctcttctgaatttaacagttattggaatgaaatgatcaaatttgttgtggtatcttcccagcttaagaaatgccctctaaaaacattagcctgtctttattttttctttttttctggtctcactctgtcagccaggctgaagcatggtgtggcaatcacggctcactgcagcctttgacctccatgggctcaggtgatcctcccacctcagcctcccgagtagctgggactacaggcacacgccaccatgcctgactaatttttgtggggttttttttggtagagacagggtctcgctgtgttgcccaggctggtctcaaactcctgggctcaagcgatctgaccaccttggcctcccaaagtgctgagattataggtgtaagccactgcacccaacttaatagggtcttttaagtgagctgaccccacaggagggaggctctgagaaactgataattgtctactggtcttccagataaagcttcctctcagagtaggggctatggctggttgactctgtctccagtagcaagtcatccctgagcactgtgaaaaatggagtttctagagctgtcaagccaacatctgaccccaagaatgaggtgtttctgcaagcaatagctgtccccaggccacacagtgcagtcgttatgtaccactctcaggcactcatctgctcatgcactcattcattcattcattcattaaatgttgagggctgctgcatccctgtgctaggcaggaaggaacacaacagtgcacaaacccatgcccaggctgtgccctcatggagttgcaagttttgccttaatctggccacatctctgagacgcagtctgtattagagtagaaacaagtaaagaacattacacaccaagattttctgaatttcttcattgtcacacttcacatgatattttactatgtcctggaaaatatccttcctattttcaagtttattcattgactcataggtgtcaggatttaagacagaccagcccagaaattgagtcaaagactgaaaaagaaagaaaggaggaatcagagacagaacacctaagtttaatcttgactctaaaactcatagcaagagtctctaggcctctgttttctcagctataaaatgggtttgataagctgtgtgctgcccaccttgcggagttcttataaggctaagataaaggaatggatgtgaccacactgtacataaagcactaacatacagaaagtaccattcttatgtgtaataacttcacaaaaagagaatgtgtttttgcctatgtggggataggggatatctaggaacgctgtactttttgctcaattttgctaagaacctaaaactactctaaaaagtaaagtttgttaattattttttattttttatttttttgagacagggtcttgctctgtcacccaggatggattgcaatggcacaatcatggctcactgcagctttgacctcttgggctcaagtgatcctcttgcttcagtctcctgagtaactaggaccacagatatgcgctaccatgcctggctaatctttttttaactttttgtagaaataggatattgccctgttggccaggctggtcttgagttcctgggctcaagtgattcatctgcctcaacctctcaaagtgctgggattacaggtgagagccaccatgctcagcttaattacattttttaaaaaggaaatgtggatttctctgacagcacatcagtgcagtacagcagtgagagtgaagaaagtggttgatgaggcagagtcagggttatagcaaccaggttgctgccccatgtgatagcgcagtgacacccagcctcccccagcaagctgactctgaatcccaacagcaaaaggcctcctagcaagccatacctccatgagcgtctcatccatttcatcaaagggcttcccatctttacgattgtaaaatgtggccactccaacaatttcttccttcttgttcacaatcggcattgaaagcacatttttaatcatccatccagactcatccagaggttctttctacaagagaagggctagattaggtttcctcttgtttcaggccacagaggcaacgatgatagatttcaccctacatcatgaccctgattggctgagaggaggtggcaagaggatggagttcattggatttcgcatgagtttaattaccgacaactaccatgagaaataacccatctggtcggaattccttaagccaagtagccattttgtgttcacccctcagatgtcagggccagtgtgtgtcaggcagtgtgttacagggatgtaatgatgtgcagaacatcccagagaggtagtgtttctctttcagatatgggaggcagtggcaggggactggcttaaaagggcaatgctatgattcttgtaacgttgaattaataacctagatataacctgcacattttgcctcttgccctgacttcctatgttacttttagtacttcattttctctcctggggcctcaattttctcatctatagaatggaaagaatctgtgcctcactgaacaaatgaagttcttgatcaattataagatgcctttggtgaggctaggcatggcgactcacacctataatcccagcattttgggaagtcgaggcaggcggatcacttgatgtcaggagtttgagaccagcctgaagaacatggtaaaaccctgtctctactaaaaatacaaaaattagccaattagccggatgtggcggcatgctcctgtaatcccagctactcgggaggctgagatgggagaatcgcttgaacccaggaggcagaggttgcagtgagctgagatcgtgccactgcactccagcctgggcaacagacagagactccatctcgaaaaatatatatgtatatatatatatatatatatatccgttggttcatcaaacatttagaatgtgcaagaaactgagctagaaactgaggaagccaaggcacagatcttgtcctcaggttgctcataatctgtaaggtaaaccagcaattacactgcagtgtgggaagttctctaagagagttacattatggaactatgggagccagaggagaaaaggaagtcaaggaaggcttcctggagtaggtgagtcttccaatcctgaagtttcaagattcttaacatggtgagatgataattgttattatttaaataatactggaaagtaaaacagctgtcttagcacctggtgagagagtgtctccaaaaggatgcagaatactgcctgaagagcacaggtttgtattgaactcagacctggctgcccgtagcactctacctaatcttcatggaatcccttccctctgaaggccatgataaaaagacagattttattgaaaatgaaagaggacaccattaaagatttttaagcaaagaaatcattgattcaacctatgttttttgttttttgttgagacggagttttgctctgtcacccaggcaggagtatagtggcactatctcggctcattgcaacctccgcttcctgggttcaagcgattctcctgtctcagcctcccaagtagctgggattacagatgcccactaccacgctctgctaatttttgtatttttagtagagacagagtttcaccatgttgaccaggctggtctcaaacccctgacctcaggtaatctgcccgcctcggtctctcaaagtgttgggattacaggtgtgaaccatcgcacctggcccaacctatgtttcttaaaaacattattcaggggctgggcgcagtggctcacgcctgtaatcccagcactttgggaggccaaggcaggcagatcacctgaggtcgggagttcaagaccaccctgaccaacatggtgaaaccctgtctctactgaaaataaaaaattagctgagaatgggggcgcatgcctgtaatcccagccactcaggaggctgaagcagcagaatcgcttgaacccaggaggcggaggttgtggtgagccgagatcgtgccactgtactccagcctgggcaacaagtatgaaactccatctcaaaaaaacaaaaacaaaaacaaacaaacaaaaaacaacattatttaggctactttatggagtatgagttggaggaggaagaccagaatctaaaaacaagattaaatttgctttactaatgtagttaaactgcaatcaagtggatgacttgagtaaagactacgttctgctgtggttgtggtcaggttagcaaccctcagcaagtcttcaggcttgtcgcattgatgtggtcaaaatcacaacacatgaagtgcaattttaactttggaattattttctgtctaagctttttcataatgttcttgaaggagaaaaaagtaattctgacttttctgagtcatttttatttccttctgaattatttcctgattgataatgatttgtttttcttttatttgtttagcctagcatgctaaaccaaatcagtagtgacagggcccccagagctgaggatatcaagaaagataagacccaaccttgaccaaaggaagtcacattttactaagaagaattagtctgacacggagacaaggataataaaagatgacataaggaaaatacataagagacacaagttccttggtgtgcctttccaggccctgcaggatctggtctctgtccacctctctagaatcttctcctgccagtctctccctcaatttctcactcagatttgttggcttattctagttccttccaataagccatctttttcctgcaatcttctcccctctctctactgtccaaacataagttttggggacatatttcttgattcctcccagattaagtcagaatctccagcgatgcccctcctctcccctctgcccttctcctaatcaccactcggtgtctctttccccatgcaatcatgagcttcatggagacaaagactatgcttgtctggcccaccactgtagcaagtgttaacattttgccaatgctttcacagaagatatcttccatgaaacatttgttaaaaaaaaaaaaaaaagacaaaatcaaatggaaggtcaggcgcggtagctcatgcctgtaatcccagcactttgggaggccgaggtgggtggatcacctgcggtcaggagttcgagaccaatctgatcaacatggcgagatcccacctctactaaaaatacaaaaaattagccgggcgtagtggcgggcgcctgtagttccagctacttgggaggctgaggcaggaggatggcgtgaacctgggaggcggagcttgcagtgagccgagatcacgccactgcactccagcctgggcgacagagcgagactccgtctcaaaaaaaaaaaaaccaaggagagagaaattacattcagccagaggaatcataataaaacttaacagaagtagtagcatttgaggttgtcattgaagggcagagaggatttcaataggagatggtagaacaggatttgaacaggagatgatagggaacagcataagcaaaggtgctgaggccagtcaggcatagtggtgcacacctatagtctagctaattggcaggctgaggcaggagttttgcttgaacccacgaggttgaggctgcaatgagctatgattgcaccactacactccagcctgggcaacagagtgagaccctctctaaaaaaaaaaaaaaaaaaaaacaaaagaaaacaacaacaacgacaaaacacctggcaaagtggcattttgattatatttattgaaatacaactttaatgtctgaatctgatcatgaaactttggagcttttgtatattatatattgtatatcttgtatacaatattgtataattgtatacattatataattgtatatatattgtataattgtataatgttgtattatatattgtatattatatattgtatatcttgtggggggaaaaatagatcctgaggccagaaagcaaagagtgtgaatgttaaaactgaataggaccttggaaattacccagttaactctgtccccatttccattggtacaggaattttatcctgtcatattttcactttgttgaggctgcttcccagcagagtgggtggattctaatgtattctaatgctctttggggaggaaaaaaaatcatatgactaagactgcaaataaaaaatgacttacctgaaatgcaaaaaagtcctccgcaggcgcattcatgatgttgcaaatctgagagcagtgaaggggaataatgaaggtgtgattaggcctgagagggtgcccagtgaagcactgtataccattttcagaaacaccatgttcttgtccaaggcattcacattcttttcatcaggtagacatagtcgagacagttttcaattattcactgaggctactagacagaaaagtcaccttataaacattactttttatgatttgctccactcttgaatcatttctaagctttgaaaaagttaaggctacaatttgtcattactagtagctggagggtatcccattttgttgttccccttttcttgcttatttgggttgtatccatggtctttaagttaatataaataccagcccagccaatgtggtgaaaccctgtctctactaaaaatacagaagttaaccagcagtggtggcgtgcgcctgtaatcccagctactctggaggttgaggtgggagaatcacttgaacctgggaggcagaggttgcagtgagccgagatcgtgccactgcactccagcctgagcgacagagtgagaccctgtctcaaaataaaataaaaaactacatttgggttctgttttgtttgggcaggtaggggtttttcctttgcgtataaaccccaaagtagaataataaatgaaaggtgttgtagctctggttctatattgccagattcctctcctgaaaattgaaccagtttaccctactggtaagggatcagatgacacttatctgatctccccagagcactgtggggccaccgtgtacagttgtgtaatgtgtgaactgcacacaggcatctggctgaggggcaactgggagctgaaatccagcctgtgatctgcttgcagcgccatgaccttgacctttctttagtcatccttgagaaacggtgccttctagttctcaaaaaggcaccacctgggcttgtagtgaccctgcctgacaacacaggagtgggctgtctgtggtcttagagagcaggctgtacctgctccttcctgtccaaggactgcctgctcactgcaccagccttctgacctctcctttgaccaactctatcagttactatcattgtctcctgatctcagagttcttggagccctctttcctctccatctgtgagcatgctggtgtctctctcatgcttgaaaatgaaatccttcctgcatccatcatggtccctatagcaagcacccaggcattctcctcttttcttttgcattctttaccttctcgttacccatccactactcagcaaaccacatgctggttctgcttccacctcaccaccaaatccattttcactggggccaccaataacctctccagtgccaaacccaatgagggttttcaattctctcaccagttcactctgctgcatgtcatcatttccttccctgttgaaactttccacttccttccagacactttccactttccacttccagagagacactgccctctcctgggtctccaaacacctctgaaccttccttctgtttctctatccaccctcctctttctccacccactctgtagatgccaacaccctccattattgcaccctaggtccactgcctgtctccctctccctaagtggcttcctccacactcataatttcaaacaccatctggtcctgatatcttccaaatctctgcttccaacactcctctctctccatggcatcagaattgtctcttcatctacctgctggacagctgctcctaaaaaatgtcatagttttaccttgtctgaaactgaccttgtcatcttacatccaagcatgatgacagcactatctattcagtctagaagcctgaaattagctttgactcctctcttccccattctctgcctacaaccaatcacaaagccctgccagcttcaccctctcaatattggacctgacccattatccccttcttgtgttcttgcctctgtcaaagttgttgtgagtattaaatttaggtagtgcctgactcatggtaagcacccagtggctgttagcaagaatgatagtattctttaccccacctgtctttgctgagattctcatcacctcttacttgaatgatgctctggttactttgcctgcagtcctagtccttcagatccacttcccaggaagctgctagagttatctttcttttctttctatttttttcttttagagacagggtctccctctgttgcccaggctggaatgcagtggtgcaatcatacctcactgcagcctggaactcctgggctcaagggatactcctgtctcagcctcttgagtagctgggactgtgggcttgcaccaccatgcctggctaatttttaaattttttgtagagacggagtcttggtatgttgcccaagctggtctcaaactcctgggctcaagtgatcctcctgcctcagcctccctaagtgttgggattacaggcgtgagtcactatgccctgccagagttatctttctaaaatgaaaattgactatgtgaatctcctgcttgtctacctgtcacctgtagattaaaatcccaccttttgaggatgagcatggtggttcacgcctataatcccagcactttgggaggttgaggcaggtggatcacttgaaaccaggtgttcgaaaccagcctggctaacatggcaaaaccatttctctactaaaaatacaaaaattagctgggtgtggtggtgcatgcctgtaatcacagctattcgggtggctgaggcatgagaattgtttgagcccaggaggcggaggttgcaatgagccaaattctcaccactgcattccagcctgggcaacagagacactgtcaaaaaaaaaaaaaaaaaaatcccaccttttagacaaggcatccaaggcctgttgtaatttagccccttcctccctcttgagcctcatgttttgctgtcttcctgtctcaaatctaatactccagccacacttaaccatacacagcacactgctccagtcctccatgcccatgttgtttgcccatgttcttccttccacctggaacctccttttatgaccccatctgcctaagacctttttattttgttttatttattattatttttttttgagatggagtctcactctgttgcccaggctggagtgcaatggcatgatttcggctcactgcaacctccgcctcccaggttgaggtgattctcctgcctcagcctcccaagtagctgggattacaggcgcctgccaccatgcccagcaaatttttatatttttagtagagatggagttctgccatgttggccaggctggtctccagctcctgacctcaggtgatccacctgcctcggccccccaaagttctgggattataggcgtgagccactgtacccggccaagactatgcacctttctacctaaggattatttatctatgtatttgatatttcctcaaatgtcaattatctgttcattcatttagaccagttgccaactgaattgagagaaacaagagaattaggcttttagagatccacacttgccatcatcttttccactctcttcttgatctgaaatccttccactctttcttccacgtgatccaaaactctcccccttcaaagttatattacttaccaggccattctgggcaacataagctgggagaccgcttactaaagcccaatggtcaggaggtggattcctgtgaaggccaaagacaaaacggtgactctcagtgcagggattgctggactaaagactaaaatctgggtgtttgcgctccccctgctctcaggtggctctcagcacctgcttacattcactacacctgaccaaacccaaaatgttggccaaccatcttaatgttcaaatctagacatggagaaagggtggcaaatataacattttactgtctgcccaccaagtttcaccatctgagaaaagagacagcattcattctacagattgttacctgctgctgagcagaaacaaacaccatcacttccctcataaagttagaagctactaatactatgtagagaatgaaaaaattcatctatggagaattcctaccatgtgctaagcactaagctaagtgcattatatacttatccctcacaatactataattttttgtattattactttttgcttgtttgttgtgagaaaaaaacacacacataaacaagcattaaaaacttcaccaatcattaggaaatgaacatttataaaaccacatggacatcaagaacagcattgtcagctccttggaagccattgactttcccccgcaatcataaccttctccctaaccccaaaggtaaccattattctgaaattatgctaaattgcatttttgcttttttgtagagttttagcttctaagcatgttttcctgtacctgttagtttaattttgcttatttttcaactcatttagatggcactgtacaacgtatattattttgtctggcttgtcacgttgctgtaattcattcattttactgacttacagtgttccctacactactgtagcacaatctatccattcaactgttggtggacatcccccatcccttcacttaggggctaatataaacagtgctgctgtcaacattggtgcatatgtgctctcagttctacatggtatattcctaggagaagaagtactaagtcataagatatttgtatcttcaactttactagatgaggccaaactgttttctaaaatgattgtagcaattaacactcctatcagtggtccattagagtttgctttgttctccatctctgtcaatactattttcagacttttaaatgacagtccttgtggtgaggtctagtggtatctcatcatagttttctttcatatttctctacaaaattaataaaatggagtaacttccataaatgtatttgtcatttgcattgtttttttgtgaagttcctctgttcatgtcttttactcatttttaaaaattacttttaaatttacttttactcattttttgttccttaaatactacttttactcatttttgttccttaaatattaattagaactcaggcagtggtgtgtgcctatagccccagcgactgaggagtctgaagtgggaggatcactggaaaccaagagtccagggccagcctgggcaacatagggggactccatctctaaaaaatataaataagtaaatataaaccactaagtagaattcacctgtgaaaaaaatctgggtctgggttgtctttgtgagaaagttttgatttattttattgtaatacatattttattgtaataaaactgttatatttcttcttgattttgtcagttttactattaatttttttcctcttattctttttttcaagatagggtcttactgtgttgtccaggctgttcttgaattcctggctttaagcaatcctcccacctcagtctcccaagtagccaggattataggcatgtgccaccacacctggctaggttttttgttttgtttgagacagggtctcactctgtcacccaggctggagtgcagcagagcaaacctggctcactgcagcctcaacctcttgggctcaagcaattctcccacctcagcctcacgtgtaggactgtaggcatgtgccatcacacccagccaatttttaaaatttttttatagagacagggcaaccactggcaaggctgctttgagctggctatgttccttgcctgaaggtcaatgcttctgtcaagatggtttgctctacgagactcttttttattccagattatggaaatttccctttggggccagaagtggtagtagctcccccactaatagcacattctcttatggttcccttcattccacacacacctttgcaatttgtccctctgtaaataaaccctcaccgaattatcctggtttgaatgtgacacctattttcagttgagaccctgactgatatggatggatgcatagctcattacttgttcagcctttttacatttaaacatgtgcatttgaggctgtaaattttacattaagcacaatttcactgcatcacacaggttttttattttttacagaggctttaatatgtaatattttcatatctttcagctcagaatattttctaatttccattaattgattcttttatccataggttgtttggtttcagaagggtatttcttagttcccaagcatatgagaatttcctaattagctttttgttactggcttaaagcagtgttctatctatatttattaggttaaattcattaattggattattcaaatattctatattctgtttgttcattttagtttgctccttaagtcaattagcaaacagattcatctatatctccttgtatttctgttagtttttgttttatattttttgaggtcatgttatgaggtgcttgcaaatttagaatggtaatatcttcctgtaatattgaggtagattgacccctttatcattaagtgactctttatctctactaatgctctttggtatgtctatttttctatgatattaataacatggttatacaagttttcttttgattagcatttgcatggtatgtcttttttcagtcttttatgttcaacctctttgtattctctttcagattagtctcctgtaaacaggatataggatttttcatcatatcttgggagtaatcattgttgactaacttttgtatgtgcagagaaagattaaatgctgccaattaacctataacgtaatctataatgcttatcacttgtaatttttactttattcagatcaacattgctcttttagcatttatacacagattttttatcatatctcacacttttttctgtcattttgtgccagttaagataatttttcacttcaatgctgaatcatagcataatctctctttaaaattattttacatggcaattgaattcaatgtgaatagcaaccagcaatggttgctcaacaataactatacttacaacaatatgaatggtgggaaatgaaaattacaggagaccattgttttcaactaaactcctgtagtaggggccctaacagatcgaactaaaaattaaaatgaagtcacctacatcaaagttccaagtcaccaaacactaaattgctatctgaccttctgagaaatcaggagaaacaaaagctaattttccaaacaagccagtttctttttcctttttttttttttttttttttttgagacagggtctcactctgtcccctaggctggagtgcagtggtgcgatcatggctcactgtagcctccacctccccggctcaagtgatcctcctgcctcagcctcctgagcagctgggaccacaggtgtgcaccaccatgcctggctaatttttgtatttttttgtggagatggggtcttgccatattgcccaggctggtctcaaagtcctgagctcaagggatctgcctaccttagcctcccaaagtgctgggtttataggtgtgagccactgtgcccggcaacaagccagtttcaattggcatgatgatgaagtttcctctgctttagtccttacacacacacaaaggtagcctgaaatagcttgatgtttacttctcagtcatttttctattgtcctatttccctgtcctgccttacaagaaaagtagctttaaaatgaccaatctgcttttttgttctttgttcctataaaaccaaccccttctgctcaactcattggaacacttactctattttacacaacaaatcattgcccaattctagaatctcaaataaagccatttgagatctgtagatgaaacttattgtaactttgtcttttgactatggttatgaccgagttcacacctaggcaataacaactttgtcatgtctgccatggctaacaacgatcacacaattctatttcagaaatgtcaaaaagtagaaaacagcatcttagaattaatgaaaggtaatgtatttctttcttaaccaggctggcaatctttgtcatttaacttgaacatctagttgatttatatttttttaaattattggccattgcatcagcttatgcctataatctgagcactttgggaggctaagttgggaggattgcttgagctcaggagtttgaagaagccagcctgggcaacatggtgagaccccatctctattaccaaaaaaaaaaaaaaaaaaaaaaaattattggccaggcatggtggctcacacctgtaatcccagcactttgggaggtagaggtgagaggatcgcttgaacccagaaatttgagaccagcctggcaacatagtgagactgtctctataaaacactaacacgctaattaaataaataaaattcaaataattgatatatttgaattcgaatttcaccttgatatgtacattttgttttcctacctgctctatgttcttctctccttctttctccctctcttttttagtgaaagtgtctcactatgttgcccaggctggagtacagtggctattcacaggtgcaatcatagctcactgcagcctcaaattcctaggctcaagcaatcctcctgcctcagcctcctgattagctggggctatagacagtgcatccacatccaacatctatgttcttcctgaacttttattttgccttcctttggtttgattagtcatttatttactattcaattttcccctctgttagtgtggatggcatatactgtgacagccattctgcatgtttacagacattctggctgtctatcctgggcacaaggtcagactgcgtttcctaaccactcaagtaatgtgtggccatgtaactagctttgaccaataaaatgtgagtataagtgctatgtgtgtgtcacctccagatggagattttaagagccagtgtgtatttttcctctcttctctgtggcaaggttattctatcttgcaaggttcaaaatggcagctgctttatcagccttggctcctgcctgactacaacccacccaccatatctccaaccacacccgctagctggcagtgcacccatactgggatggtgaaataaattttagttgtttataccactcaggtctccaggtcttgttatgaaagcagagcctggcctatcttggctgaaacaaagatttgtgtcagaaacagggtgctgccataataaaaaacctaaaacgagaaacataggttagggactgggtggtaggcaacaagatgaatgttatcagaagctagtaggatgtgatgctggtcaagcagagacaaacagaaaattgcgacctgtgaccatttaagagacagataatgagttaataagattgtggctctagaagctagaaaaggggctagaaaacagaattgttgaagagtatgcttttgataaggtagaaaaaaaaagagagatgaactttagaagataataagggaatcaggctgggtgccagggctcatgccagtaatcccagcactttgggaggccaaggtaggtgaatcacttgaggtcaggagtttgagaccagcctgaccaacatggcgaaaccccatctctactaaaaatacacaaattagctgggtgtggtggcgtgtgcctgtaatcccagctactcgggaggctgaggcaggagaatcgctttaacccaggaggtggaagttgtagtgagctgagattcggccactgcactccagcctgggagacagagcaggactccatcttaaaaaaaaaaaaaaaaagagaatagaataaggtaatcagtccttatgcaggcagcaataaaggaatagagataacctagaaattgagaaacttgaggcagcttctcatcctcaccggtaacagacaaccctgagaacttgtttatctgggtgacgggattactacagtttggtctggtgaccaaactgaatcagcatggcctatcacacccacttcttgaagattaagttggcatgcagtaaatcccttcagttggacaaaattgctgtgggggctaagactaaaggtgtggctctcccacgaaccgaattacagcctcaaggcctctgcagttaagttgagaaaaagggccatgtctcaggacagaaccatggatgtggcttttagcacgtggagaggattcaaacagagaagaaggtaactaggtttttgagaaaggtctactgaccaaaaaagtataagcccatatttaaacagtttgcaaccgttcaaatcttctaatggtcattgagtctcagctacctagatgcaggactgagagcattctttccttttcttttcactgtcttccttggtcacacatgaggggacattgagaataggctttctgtgggggctgagtcagttcctttgcagcttcctgcttttgctttgcctccttcaagtaccagaagagtagcactgcagaaaacagttgaaaatccctgatttcatcccagtctcattctatacatgggactctaaggtccagacaaaccacttactggccctggctgtgagattgggactcagagcacctgactcacaacctggtccactgtagccctcatcaaggctctggtcaagtcttcccccttcttgggcctcactgctcaccctctgagtctctctaccgtctcacactgcctccttcccactctccctgcctctaaccaactgtggggtctcattggatttggtcagtgttgatcttggaatgagtatcttttggaagttgataatgtacctgcagttttccatgttttgagatgtgttaaaataaaaactataggaggcccttgttttggacaaagctctgcaccaagctccaacaaaccaaactaaaaatcagtgtggagtcaccgtgataacgttccacttcaccaaatctaaactaagttgttttctgatcctcttagagattaggagagaggtaaacgccaatttcccaaaaagtcctgttccagtctttaataggcatgataatgaagttcctctgctttaatccttacaccaaaaaaaaaaaaaaaaggtagcagtaacctgacattaatcagttatttttctactgttctatctccctctcccaccttataagaaaagtatcttaaaaatgattaacatgttctttgatctttgcttgtctttcttcagtccttctctgtctataaagtcaaccttgtcagaacacttatgtattttatggaatgaagtgttgcccaattccagaatcaccgataaagccaattgagatctttaagctaatttgttgtcattttgtcttttgacaggtgaaacttacgggatgactttgatgtcctctttgccatgcaggatgtagtcaatgaccttgtaaaagttaatttcctggcaaaagagagaaaaattatacttttttttttttttttttttttgagacagtttcactttgtcgcccaggctggagtgcaatggcttgatctcagctcactgcaacctccatctcctgcgttcaagctattcttctgcctcagcctcccgagtaaatgggactacaggcacgcaccaccatgcccggctaattattgtatttttagcagagtcagggttccaactcctgaccccatgatctgcccacctcagcctcccgaagtgctgggattacaggcgtgagccactgcacccagccaaaaaattataccttcaagagtcaaatagaagttcaacaggagtatgtccctgaaaccaactttgtccttttaccatcgtatgccccgtagtttttgttgttttaataaattaatgtttttattgatatacagtagttgtacatattttgccccatggttttcaggaagtgccaagcctggccataaactccctccaaggatgtgcctgggctgccttctggtgctccctgtcctctgctgaccctcagaattcagcgtgcttcaccttggaggcagctcacagtgatcaggaagagggctgggatctgaggctgggaagagggataggaaatcctctaagaggatctggaggttgattgtgtgcaagttgatcacacaagttgggacatttttgtcatacccaaataaaagagagttgagaagccagggggcaaaaaagtactcaggacactagcattgctcccagaatgtaattctttgcatgcctggctgcttacgctacctgctgtgacttgaaaccagttttatctgatagttgctgaaacaacctgctgcaactctaggactaattttacccactgccattactcatcagtcaaaacttgccagctccccagacccttactggtgtcaatgaactttctcagagagcaacatgtaatatttctcttttttcttttaaacacagggtcttgctgtgtcacccaggctggagtgcagtggcacagtcatggctcactgtagcctcgaattcctgggctcacgtgatcctcctgccttggcttcccaaagcactgggatgacaggcatgagccaccatgcccggcctcatttctcttttttataaaaccgtctaccttctcttttttctttggacatactgaagactacttagtctgcatgtatgccccaaattgcaagtcttcctttgccccaaaacattaaatatagagattcgtctctgcgttttaattttgactttgataagtgcaagaagaaagagataaagacggctgccagaatctagggagatggggaagtggtcaggaggttcccatcccatttaaaatcacagccaaccagccatcctccctgcagggtgcatctctatgtcatggccccatttctccttcatgcctaccactcagctgttctctttgctgtgtcgtcacttcagacctaccttctcatcatgtttcatgaccccaaactaactctctgcctcttccatctctcccgcctccttgcattgttaaaattcccattctcttaaagcagagctcttcaattacattactctctagcatgcaattggatgttggcatgtgactccattcccctagctctccaggggaaattctattacctttttcttaggtcctctgtatgcccaagcgtgatgagcaactatttcacaaatgagaaagctgagacacagagagaggaaaggactcacttgtagcaagacagtgaaccaaaatcagaacctgggtccttaattcccagctcagtgcttttcctctatgtcacctaacgttaacagcttagtgttttactgtccgcatcactgtcaccttgaacagggttgctcagagtgtaatccctgggccggtgcctgtcttgtgaactctttactattccaggagaagataaaaacagaaactgagagtcacttaggaagttttgtaacaatttgactgagttagatcaggtctgtttaattgaataaaaggggatatctttttttttttttttgtgacggagtcttgctctgtcgcccaagctggagtacaagtgcagtggcatgatccaagtttatattttgtctgtctttatacaattttgtttttctaggaatatattttatcatatttttaaaagtagcaatcaaaacatactggaggcgtgactcactctcttgagtatgcctgcactcccctttcttgagtgtgtttttcacacacacaaaaaaaaattggaaatttttttaaaaagaaaaaccaaactgttcctttactacaggtattttgagaagtacctccctagagatttcagtgcagatacctgggctccaccccaagcctcccgactcagaacctccacaaagaggaattcctgaaccagttaaagatgtctgaaggtctgtttggttgacgggcaatcagcaatggtcaacttccaactcataagggagaggctctgctgctcaaagcctagcattggcggcagctgcactgactgaatacttctaggaggcgagctctggttaaacaaaaggcagaagctgaaaccactccaatggcacaggctacccccaggggtagtgagctccctaaaataggaagcatccaaggggagactagatgaacgctgaaatacaataaataaaatggagctgagactagacctagagtgaggattcctgttctagtttcggtcctactatgggtgttctctaggcctcagtttctctggctgtaaaattggaatggtggtatgtgtttgctacagctgttcagtagcagctctctttccccaagcaaagcatggaagctaattatatgaaactgtcctaatggaatcagggccgggtatatagagtccctgcccctttgttctctcttactccctttcctgtcctcttccttttctattaacccctggtcaaggcagctactgtggaactctaaggttctaaggacaatgggggagaaagaaaattgttttagaaaatccataaagaccctccaagctatgattctaaggttatgataagataggtagcaatatctctcaaagatcaaaacagacatattatttgacccacatgtggtgatggatcctagagatatactcccaaatgtgggtaaaagcattttttgccccgtccaagggtcttagctagactgctttaaaaagtctggagatgatgtaaggtctcttattaggaaagtggttgtacagtggacaccacacgtttccagagcaagattgctgtgcctgtgctgaaagggaaaggtgacaaaatattcagttaagtgaaaaaagcaaggcacaaaatagaatcatagcgttagtgcagagtggtggtggtggaatacgtatacttctctgtggatatctggatatacctaaatgttcctgcaaagagagtttgctaacagcagctgcttcacaggggctgactaggaggaaggtggcacttaatttcgtatggagtgaacttttcactgtgctcatatattatttttccaacatacaaaccaattttctttttttatattttttattttgctttattttattaatttactttttttgagccaggatctcattctgtcacccaggctggagtgcagtggcacaatcttggctcactggagcctcagtttcccaggctcaagcaatcctcctatcttagcctcccaagtaactggtaatacaggcacgcgtcaccatgcccggctacttttctttttttcttttttttttagttagagacaaggtctcactttgttgcttaggcaggtcttgaactcctggccttaagtgatccttctgcctcagcctcccaaagttcttggattataggcatgaaccactgcacctggcacaacaaactttcttaaaaatatttttaaatagtcaagttgtaccctataagcagttctagaaagcaaaggtggctgctttctagaacacttatttcctaggagataagtttctgcctgcgagggggaggaggcagagttccaggaccttcttgacatctttgtcttgccttagggccacctgtccttgggcctgtgctgctcactgtactcctggcaggctcagggcttcctgggcctggctgctgtcctacccagggattcccacgagagtctttagaaaggttagaaatggacatttctaggccgggtgcggtggctcgcgcctgtaatcctagcactttgggaggcggaggtgggcagagcacttgaggtcaggagtctgagaccagcctggccaacatagtgaaacctcatctctactaaaaatataaaaattagccagacataatggtggggcacctgtaatcccagctactcgggaatctgaggcaggagaattgcttgagcccaggaggcggaggttgcagtgagctgagatcatgccactgcactccagcctgggcaacagagtgacagtccatctcaaaaaaagaaatggacattttttttggaatcccacaggagaaaaactgcaaagtttttctttcccagaattaacaaaaagatcagtgtgctttgggtaactaggctttttccactcactgtatctcagtcaaagtctttaaagccatattcatgtacaaattcaccagcctctggaaagtcaaaactgagtcatcaagagtacctttgttaccttctacctgagcagctgacacaaggggctttgaaagagccacagatacccatggaaatacaccactttttaaaagactgctatttttttttccatgaaggctttttagcctgtataacttttaaatatttaaaacatacacacactattttatttttaaaagtagatgaagcaagatgtagctgacactgtgaggctttcgacctaagattcgggaacattaattggttggaattc

SEQ ID NO: 107 - DNA, 197096 bp, Homo sapiens
gaattctctgcctcagcctcccaagtagctgggattacaggtgcccgccaccacgcccagctaatttttgtatttttagtagagatggggtttcaccatcttggccaggctggtcttgaactcctgacctcgtgatccacccgcctcggcatcccaaagtgttgggattacaggcggccctgttgaactacttttatacttgtgacatggttacccccaaataacctgactgaggttgggggtagcttgcagctttctttcactttttattttatatgcatctctattcttggaatccttttacactaagcccgtactgctttcacataactcttaaaagacaataaataaagaaagaagaacaacgctgttgctaccatgtagagtctgcatgagattgtctagtgtgatgcaagcccaccctaccagccccaccggccccgccataccaccagcagggagaacatggtctgccccacgttgaagccgtgccgccagttgtggtaggtgatcttgcggtagcccttactcagggagtacatgaaccgcaccagggcctgtgaacacatgcacatcagtgaggcaggacacacctgaaatggtctcatgagggttggaataacaaaaatatgaagaaggcatggcccatggccctctcttttgaggtttgaggtactctaaccccatcattggaccaggaggtgagagcttgtactagatgcaatcatgctgcgaaagtgctttgcaaatactaaatgctaaatactaagaagatgttgttgttgttgttaggaaacgaggtgagcatgcatcattcctctgactgagcttcatcagtaattcccgaactgtgccctggagagcaactatccttggagaagctaacaagggctctacagggaaaaaaaaaacaaaaacaaaaggactcttttatccagtggttctcaaacttgcgtgtgcatgagactcacttggaggacttgttaaaacagtttctgatttatcagagctgggagtgtgtgtgtgtgtgtgtctgtgtgtgtgagagagagagagaaagaggagagagagagagagaaaaagaagaatgtgaatttctgataagttcttaggtggtgtggatgtggtctggggtaacactttgagaaccactgctttaatcaaaatcaaacaagttcaggcaattctgcatatcatatcccactgcctcccacacataccttctctgccgtcccccatgaccctagactcacagcaaaccttagtaaggaatcctgcagggaatgagccctgtttaaatgggtttagcccacattttctgccctcatttaactataggacccattttttgcagcatatctattcccagccttcagggcttagtacctcagaacccactgcaagaaaccaacgcacccaaaacatcacacttcacaggacacagaggaacagcgtgtctcttttcttataaatgactcatctgtgcaacatgactaattctttaaatcctaaatactgagagtaaactctttttaaggtagtttacagattgagtcttttttttaaagcaagcaagaaagaaaattaaaaagggaaatcatatatatttgttttgacctcacctcttgtggaatgtgaaatttatccaccactttgagctcataatacatctgtattccacattttaccagctccagttctgttaggggtaagtcactgaagtgaaatttattaatttcgtatttatctgcatctggcagctccgcttgctgtataaggaatagagtcaggtgattaggaaacatgaagtgtttctgggtgcccacctcctgtccagccctgtccccatcctgggtctgctggaaggatcagaacagagtgatggggaacatgctttgcaaggagaaacccctgcatgctcaggagcactttgcacttgttatacatcggggctcgtgctgccccggttcagctcaccaggatctcagccagctcctcttcctcacactcccatggctccttcccatacacctctctggttttctgccaggacccaaaatggcaggggaaaaaaaataggttacaacatgcctccgcgtttccattcccatttatctccttcctccaaagtccttgcaacagaaccaccagctcaaagaggattccatttaacatccattgatgcacaaggtcctgggctttagagccatagagacctgcattcaaattcaagctctaccacttactagccgtgttattaatgcttctgatcttcagtttcctcatctgtaagttgaggataataaacatacttaactggtgaattaaaatttaattgtgaaaagtcattctcaagtaacatatgtaaaattaaataatccatataaagcacttagcacagtgcttggcgcatagtaagcactaacataaattaatgttgttgttgatagtttcattgttactattactgactgggagtaaggaggccttggacatagtcctagttcttcctctcatttactgtgtaacttgaggcaagttccttctctctctgggcctgtgtccccatgtgccagaggagggggaactggacccagttacttgctcctgatttcttgacccagagcaaaatttgttaacttgtaactggttcaccgaggctgtgccccgataggttgcacatacccattctttggctgaaactgtggactgagtcaagcaaaccatgaggcaatttatttaaacgggatgttttctcttctgaatttaacagttattggaatgaaatgatcaaatttgttgtggtatcttcccagcttaagaaatgccctctaaaaacattagcctgtctttattttttctttttttctggtctcactctgtcagccaggctgaagcatggtgtggcaatcacggctcactgcagcctttgacctccatgggctcaggtgatcctcccacctcagcctcccgagtagctgggactacaggcacacgccaccatgcctgactaatttttgtggggttttttttggtagagacagggtctcgctgtgttgcccaggctggtctcaaactcctgggctcaagcgatctgaccaccttggcctcccaaagtgctgagattataggtgtaagccactgcacccaacttaatagggtcttttaagtgagctgaccccacaggagggaggctctgagaaactgataattgtctactggtcttccagataaagcttcctctcagagtaggggctatggctggttgactctgtctccagtagcaagtcatccctgagcactgtgaaaaatggagtttctagagctgtcaagccaacatctgaccccaagaatgaggtgtttctgcaagcaatagctgtccccaggccacacagtgcagtcgttatgtaccactctcaggcactcatctgctcatgcactcattcattcattcattcattaaatgttgagggctgctgcatccctgtgctaggcaggaaggaacacaacagtgcacaaacccatgcccaggctgtgccctcatggagttgcaagttttgccttaatctggccacatctctgagacgcagtctgtattagagtagaaacaagtaaagaacattacacaccaagattttctgaatttcttcattgtcacacttcacatgatattttactatgtcctggaaaatatccttcctattttcaagtttattcattgactcataggtgtcaggatttaagacagaccagcccagaaattgagtcaaagactgaaaaagaaagaaaggaggaatcagagacagaacacctaagtttaatcttgactctaaaactcatagcaagagtctctaggcctctgttttctcagctataaaatgggtttgataagctgtgtgctgcccaccttgcggagttcttataaggctaagataaaggaatggatgtgaccacactgtacataaagcactaacatacagaaagtaccattcttatgtgtaataacttcacaaaaagagaatgtgtttttgcctatgtggggataggggatatctaggaacgctgtactttttgctcaattttgctaagaacctaaaactactctaaaaagtaaagtttgttaattattttttattttttatttttttgagacagggtcttgctctgtcacccaggatggattgcaatggcacaatcatggctcactgcagctttgacctcttgggctcaagtgatcctcttgcttcagtctcctgagtaactaggaccacagatatgcgctaccatgcctggctaatctttttttaactttttgtagaaataggatattgccctgttggccaggctggtcttgagttcctgggctcaagtgattcatctgcctcaacctctcaaagtgctgggattacaggtgagagccaccatgctcagcttaattacattttttaaaaaggaaatgtggatttctctgacagcacatcagtgcagtacagcagtgagagtgaagaaagtggttgatgaggcagagtcagggttatagcaaccaggttgctgccccatgtgatagcgcagtgacacccagcctcccccagcaagctgactctgaatcccaacagcaaaaggcctcctagcaagccatacctccatgagcgtctcatccatttcatcaaagggcttcccatctttacgattgtaaaatgtggccactccaacaatttcttccttcttgttcacaatcggcattgaaagcacatttttaatcatccatccagactcatccagaggttctttctacaagagaagggctagattaggtttcctcttgtttcaggccacagaggcaacgatgatagatttcaccctacatcatgaccctgattggctgagaggaggtggcaagaggatggagttcattggatttcgcatgagtttaattaccgacaactaccatgagaaataacccatctggtcggaattccttaagccaagtagccattttgtgttcacccctcagatgtcagggccagtgtgtgtcaggcagtgtgttacagggatgtaatgatgtgcagaacatcccagagaggtagtgtttctctttcagatatgggaggcagtggcaggggactggcttaaaagggcaatgctatgattcttgtaacgttgaattaataacctagatataacctgcacattttgcctcttgccctgacttcctatgttacttttagtacttcattttctctcctggggcctcaattttctcatctatagaatggaaagaatctgtgcctcactgaacaaatgaagttcttgatcaattataagatgcctttggtgaggctaggcatggcgactcacacctataatcccagcattttgggaagtcgaggcaggcggatcacttgatgtcaggagtttgagaccagcctgaagaacatggtaaaaccctgtctctactaaaaatacaaaaattagccaattagccggatgtggcggcatgctcctgtaatcccagctactcgggaggctgagatgggagaatcgcttgaacccaggaggcagaggttgcagtgagctgagatcgtgccactgcactccagcctgggcaacagacagagactccatctcgaaaaatatatatgtatatatatatatatatatatatccgttggttcatcaaacatttagaatgtgcaagaaactgagctagaaactgaggaagccaaggcacagatcttgtcctcaggttgctcataatctgtaaggtaaaccagcaattacactgcagtgtgggaagttctctaagagagttacattatggaactatgggagccagaggagaaaaggaagtcaaggaaggcttcctggagtaggtgagtcttccaatcctgaagtttcaagattcttaacatggtgagatgataattgttattatttaaataatactggaaagtaaaacagctgtcttagcacctggtgagagagtgtctccaaaaggatgcagaatactgcctgaagagcacaggtttgtattgaactcagacctggctgcccgtagcactctacctaatcttcatggaatcccttccctctgaaggccatgataaaaagacagattttattgaaaatgaaagaggacaccattaaagatttttaagcaaagaaatcattgattcaacctatgttttttgttttttgttgagacggagttttgctctgtcacccaggcaggagtatagtggcactatctcggctcattgcaacctccgcttcctgggttcaagcgattctcctgtctcagcctcccaagtagctgggattacagatgcccactaccacgctctgctaatttttgtatttttagtagagacagagtttcaccatgttgaccaggctggtctcaaacccctgacctcaggtaatctgcccgcctcggtctctcaaagtgttgggattacaggtgtgaaccatcgcacctggcccaacctatgtttcttaaaaacattattcaggggctgggcgcagtggctcacgcctgtaatcccagcactttgggaggccaaggcaggcagatcacctgaggtcgggagttcaagaccaccctgaccaacatggtgaaaccctgtctctactgaaaataaaaaattagctgagaatgggggcgcatgcctgtaatcccagccactcaggaggctgaagcagcagaatcgcttgaacccaggaggcggaggttgtggtgagccgagatcgtgccactgtactccagcctgggcaacaagtatgaaactccatctcaaaaaaacaaaaacaaaaacaaacaaacaaaaaacaacattatttaggctactttatggagtatgagttggaggaggaagaccagaatctaaaaacaagattaaatttgctttactaatgtagttaaactgcaatcaagtggatgacttgagtaaagactacgttctgctgtggttgtggtcaggttagcaaccctcagcaagtcttcaggcttgtcgcattgatgtggtcaaaatcacaacacatgaagtgcaattttaactttggaattattttctgtctaagctttttcataatgttcttgaaggagaaaaaagtaattctgacttttctgagtcatttttatttccttctgaattatttcctgattgataatgatttgtttttcttttatttgtttagcctagcatgctaaaccaaatcagtagtgacagggcccccagagctgaggatatcaagaaagataagacccaaccttgaccaaaggaagtcacattttactaagaagaattagtctgacacggagacaaggataataaaagatgacataaggaaaatacataagagacacaagttccttggtgtgcctttccaggccctgcaggatctggtctctgtccacctctctagaatcttctcctgccagtctctccctcaatttctcactcagatttgttggcttattctagttccttccaataagccatctttttcctgcaatcttctcccctctctctactgtccaaacataagttttggggacatatttcttgattcctcccagattaagtcagaatctccagcgatgcccctcctctcccctctgcccttctcctaatcaccactcggtgtctctttccccatgcaatcatgagcttcatggagacaaagactatgcttgtctggcccaccactgtagcaagtgttaacattttgccaatgctttcacagaagatatcttccatgaaacatttgttaaaaaaaaaaaaaaaagacaaaatcaaatggaaggtcaggcgcggtagctcatgcctgtaatcccagcactttgggaggccgaggtgggtggatcacctgcggtcaggagttcgagaccaatctgatcaacatggcgagatcccacctctactaaaaatacaaaaaattagccgggcgtagtggcgggcgcctgtagttccagctacttgggaggctgaggcaggaggatggcgtgaacctgggaggcggagcttgcagtgagccgagatcacgccactgcactccagcctgggcgacagagcgagactccgtctcaaaaaaaaaaaaaccaaggagagagaaattacattcagccagaggaatcataataaaacttaacagaagtagtagcatttgaggttgtcattgaagggcagagaggatttcaataggagatggtagaacaggatttgaacaggagatgatagggaacagcataagcaaaggtgctgaggccagtcaggcatagtggtgcacacctatagtctagctaattggcaggctgaggcaggagttttgcttgaacccacgaggttgaggctgcaatgagctatgattgcaccactacactccagcctgggcaacagagtgagaccctctctaaaaaaaaaaaaaaaaaaaaacaaaagaaaacaacaacaacgacaaaacacctggcaaagtggcattttgattatatttattgaaatacaactttaatgtctgaatctgatcatgaaactttggagcttttgtatattatatattgtatatcttgtatacaatattgtataattgtatacattatataattgtatatatattgtataattgtataatgttgtattatatattgtatattatatattgtatatcttgtggggggaaaaatagatcctgaggccagaaagcaaagagtgtgaatgttaaaactgaataggaccttggaaattacccagttaactctgtccccatttccattggtacaggaattttatcctgtcatattttcactttgttgaggctgcttcccagcagagtgggtggattctaatgtattctaatgctctttggggaggaaaaaaaatcatatgactaagactgcaaataaaaaatgacttacctgaaatgcaaaaaagtcctccgcaggcgcattcatgatgttgcaaatctgagagcagtgaaggggaataatgaaggtgtgattaggcctgagagggtgcccagtgaagcactgtataccattttcagaaacaccatgttcttgtccaaggcattcacattcttttcatcaggtagacatagtcgagacagttttcaattattcactgaggctactagacagaaaagtcaccttataaacattactttttatgatttgctccactcttgaatcatttctaagctttgaaaaagttaaggctacaatttgtcattactagtagctggagggtatcccattttgttgttccccttttcttgcttatttgggttgtatccatggtctttaagttaatataaataccagcccagccaatgtggtgaaaccctgtctctactaaaaatacagaagttaaccagcagtggtggcgtgcgcctgtaatcccagctactctggaggttgaggtgggagaatcacttgaacctgggaggcagaggttgcagtgagccgagatcgtgccactgcactccagcctgagcgacagagtgagaccctgtctcaaaataaaataaaaaactacatttgggttctgttttgtttgggcaggtaggggtttttcctttgcgtataaaccccaaagtagaataataaatgaaaggtgttgtagctctggttctatattgccagattcctctcctgaaaattgaaccagtttaccctactggtaagggatcagatgacacttatctgatctccccagagcactgtggggccaccgtgtacagttgtgtaatgtgtgaactgcacacaggcatctggctgaggggcaactgggagctgaaatccagcctgtgatctgcttgcagcgccatgaccttgacctttctttagtcatccttgagaaacggtgccttctagttctcaaaaaggcaccacctgggcttgtagtgaccctgcctgacaacacaggagtgggctgtctgtggtcttagagagcaggctgtacctgctccttcctgtccaaggactgcctgctcactgcaccagccttctgacctctcctttgaccaactctatcagttactatcattgtctcctgatctcagagttcttggagccctctttcctctccatctgtgagcatgctggtgtctctctcatgcttgaaaatgaaatccttcctgcatccatcatggtccctatagcaagcacccaggcattctcctcttttcttttgcattctttaccttctcgttacccatccactactcagcaaaccacatgctggttctgcttccacctcaccaccaaatccattttcactggggccaccaataacctctccagtgccaaacccaatgagggttttcaattctctcaccagttcactctgctgcatgtcatcatttccttccctgttgaaactttccacttccttccagacactttccactttccacttccagagagacactgccctctcctgggtctccaaacacctctgaaccttccttctgtttctctatccaccctcctctttctccacccactctgtagatgccaacaccctccattattgcaccctaggtccactgcctgtctccctctccctaagtggcttcctccacactcataatttcaaacaccatctggtcctgatatcttccaaatctctgcttccaacactcctctctctccatggcatcagaattgtctcttcatctacctgctggacagctgctcctaaaaaatgtcatagttttaccttgtctgaaactgaccttgtcatcttacatccaagcatgatgacagcactatctattcagtctagaagcctgaaattagctttgactcctctcttccccattctctgcctacaaccaatcacaaagccctgccagcttcaccctctcaatattggacctgacccattatccccttcttgtgttcttgcctctgtcaaagttgttgtgagtattaaatttaggtagtgcctgactcatggtaagcacccagtggctgttagcaagaatgatagtattctttaccccacctgtctttgctgagattctcatcacctcttacttgaatgatgctctggttactttgcctgcagtcctagtccttcagatccacttcccaggaagctgctagagttatctttcttttctttctatttttttcttttagagacagggtctccctctgttgcccaggctggaatgcagtggtgcaatcatacctcactgcagcctggaactcctgggctcaagggatactcctgtctcagcctcttgagtagctgggactgtgggcttgcaccaccatgcctggctaatttttaaattttttgtagagacggagtcttggtatgttgcccaagctggtctcaaactcctgggctcaagtgatcctcctgcctcagcctccctaagtgttgggattacaggcgtgagtcactatgccctgccagagttatctttctaaaatgaaaattgactatgtgaatctcctgcttgtctacctgtcacctgtagattaaaatcccaccttttgaggatgagcatggtggttcacgcctataatcccagcactttgggaggttgaggcaggtggatcacttgaaaccaggtgttcgaaaccagcctggctaacatggcaaaaccatttctctactaaaaatacaaaaattagctgggtgtggtggtgcatgcctgtaatcacagctattcgggtggctgaggcatgagaattgtttgagcccaggaggcggaggttgcaatgagccaaattctcaccactgcattccagcctgggcaacagagacactgtcaaaaaaaaaaaaaaaaaaatcccaccttttagacaaggcatccaaggcctgttgtaatttagccccttcctccctcttgagcctcatgttttgctgtcttcctgtctcaaatctaatactccagccacacttaaccatacacagcacactgctccagtcctccatgcccatgttgtttgcccatgttcttccttccacctggaacctccttttatgaccccatctgcctaagacctttttattttgttttatttattattatttttttttgagatggagtctcactctgttgcccaggctggagtgcaatggcatgatttcggctcactgcaacctccgcctcccaggttgaggtgattctcctgcctcagcctcccaagtagctgggattacaggcgcctgccaccatgcccagcaaatttttatatttttagtagagatggagttctgccatgttggccaggctggtctccagctcctgacctcaggtgatccacctgcctcggccccccaaagttctgggattataggcgtgagccactgtacccggccaagactatgcacctttctacctaaggattatttatctatgtatttgatatttcctcaaatgtcaattatctgttcattcatttagaccagttgccaactgaattgagagaaacaagagaattaggcttttagagatccacacttgccatcatcttttccactctcttcttgatctgaaatccttccactctttcttccacgtgatccaaaactctcccccttcaaagttatattacttaccaggccattctgggcaacataagctgggagaccgcttactaaagcccaatggtcaggaggtggattcctgtgaaggccaaagacaaaacggtgactctcagtgcagggattgctggactaaagactaaaatctgggtgtttgcgctccccctgctctcaggtggctctcagcacctgcttacattcactacacctgaccaaacccaaaatgttggccaaccatcttaatgttcaaatctagacatggagaaagggtggcaaatataacattttactgtctgcccaccaagtttcaccatctgagaaaagagacagcattcattctacagattgttacctgctgctgagcagaaacaaacaccatcacttccctcataaagttagaagctactaatactatgtagagaatgaaaaaattcatctatggagaattcctaccatgtgctaagcactaagctaagtgcattatatacttatccctcacaatactataattttttgtattattactttttgcttgtttgttgtgagaaaaaaacacacacataaacaagcattaaaaacttcaccaatcattaggaaatgaacatttataaaaccacatggacatcaagaacagcattgtcagctccttggaagccattgactttcccccgcaatcataaccttctccctaaccccaaaggtaaccattattctgaaattatgctaaattgcatttttgcttttttgtagagttttagcttctaagcatgttttcctgtacctgttagtttaattttgcttatttttcaactcatttagatggcactgtacaacgtatattattttgtctggcttgtcacgttgctgtaattcattcattttactgacttacagtgttccctacactactgtagcacaatctatccattcaactgttggtggacatcccccatcccttcacttaggggctaatataaacagtgctgctgtcaacattggtgcatatgtgctctcagttctacatggtatattcctaggagaagaagtactaagtcataagatatttgtatcttcaactttactagatgaggccaaactgttttctaaaatgattgtagcaattaacactcctatcagtggtccattagagtttgctttgttctccatctctgtcaatactattttcagacttttaaatgacagtccttgtggtgaggtctagtggtatctcatcatagttttctttcatatttctctacaaaattaataaaatggagtaacttccataaatgtatttgtcatttgcattgtttttttgtgaagttcctctgttcatgtcttttactcatttttaaaaattacttttaaatttacttttactcattttttgttccttaaatactacttttactcatttttgttccttaaatattaattagaactcaggcagtggtgtgtgcctatagccccagcgactgaggagtctgaagtgggaggatcactggaaaccaagagtccagggccagcctgggcaacatagggggactccatctctaaaaaatataaataagtaaatataaaccactaagtagaattcacctgtgaaaaaaatctgggtctgggttgtctttgtgagaaagttttgatttattttattgtaatacatattttattgtaataaaactgttatatttcttcttgattttgtcagttttactattaatttttttcctcttattctttttttcaagatagggtcttactgtgttgtccaggctgttcttgaattcctggctttaagcaatcctcccacctcagtctcccaagtagccaggattataggcatgtgccaccacacctggctaggttttttgttttgtttgagacagggtctcactctgtcacccaggctggagtgcagcagagcaaacctggctcactgcagcctcaacctcttgggctcaagcaattctcccacctcagcctcacgtgtaggactgtaggcatgtgccatcacacccagccaatttttaaaatttttttatagagacagggcaaccactggcaaggctgctttgagctggctatgttccttgcctgaaggtcaatgcttctgtcaagatggtttgctctacgagactcttttttattccagattatggaaatttccctttggggccagaagtggtagtagctcccccactaatagcacattctcttatggttcccttcattccacacacacctttgcaatttgtccctctgtaaataaaccctcaccgaattatcctggtttgaatgtgacacctattttcagttgagaccctgactgatatggatggatgcatagctcattacttgttcagcctttttacatttaaacatgtgcatttgaggctgtaaattttacattaagcacaatttcactgcatcacacaggttttttattttttacagaggctttaatatgtaatattttcatatctttcagctcagaatattttctaatttccattaattgattcttttatccataggttgtttggtttcagaagggtatttcttagttcccaagcatatgagaatttcctaattagctttttgttactggcttaaagcagtgttctatctatatttattaggttaaattcattaattggattattcaaatattctatattctgtttgttcattttagtttgctccttaagtcaattagcaaacagattcatctatatctccttgtatttctgttagtttttgttttatattttttgaggtcatgttatgaggtgcttgcaaatttagaatggtaatatcttcctgtaatattgaggtagattgacccctttatcattaagtgactctttatctctactaatgctctttggtatgtctatttttctatgatattaataacatggttatacaagttttcttttgattagcatttgcatggtatgtcttttttcagtcttttatgttcaacctctttgtattctctttcagattagtctcctgtaaacaggatataggatttttcatcatatcttgggagtaatcattgttgactaacttttgtatgtgcagagaaagattaaatgctgccaattaacctataacgtaatctataatgcttatcacttgtaatttttactttattcagatcaacattgctcttttagcatttatacacagattttttatcatatctcacacttttttctgtcattttgtgccagttaagataatttttcacttcaatgctgaatcatagcataatctctctttaaaattattttacatggcaattgaattcaatgtgaatagcaaccagcaatggttgctcaacaataactatacttacaacaatatgaatggtgggaaatgaaaattacaggagaccattgttttcaactaaactcctgtagtaggggccctaacagatcgaactaaaaattaaaatgaagtcacctacatcaaagttccaagtcaccaaacactaaattgctatctgaccttctgagaaatcaggagaaacaaaagctaattttccaaacaagccagtttctttttcctttttttttttttttttttttttgagacagggtctcactctgtcccctaggctggagtgcagtggtgcgatcatggctcactgtagcctccacctccccggctcaagtgatcctcctgcctcagcctcctgagcagctgggaccacaggtgtgcaccaccatgcctggctaatttttgtatttttttgtggagatggggtcttgccatattgcccaggctggtctcaaagtcctgagctcaagggatctgcctaccttagcctcccaaagtgctgggtttataggtgtgagccactgtgcccggcaacaagccagtttcaattggcatgatgatgaagtttcctctgctttagtccttacacacacacaaaggtagcctgaaatagcttgatgtttacttctcagtcatttttctattgtcctatttccctgtcctgccttacaagaaaagtagctttaaaatgaccaatctgcttttttgttctttgttcctataaaaccaaccccttctgctcaactcattggaacacttactctattttacacaacaaatcattgcccaattctagaatctcaaataaagccatttgagatctgtagatgaaacttattgtaactttgtcttttgactatggttatgaccgagttcacacctaggcaataacaactttgtcatgtctgccatggctaacaacgatcacacaattctatttcagaaatgtcaaaaagtagaaaacagcatcttagaattaatgaaaggtaatgtatttctttcttaaccaggctggcaatctttgtcatttaacttgaacatctagttgatttatatttttttaaattattggccattgcatcagcttatgcctataatctgagcactttgggaggctaagttgggaggattgcttgagctcaggagtttgaagaagccagcctgggcaacatggtgagaccccatctctattaccaaaaaaaaaaaaaaaaaaaaaaaattattggccaggcatggtggctcacacctgtaatcccagcactttgggaggtagaggtgagaggatcgcttgaacccagaaatttgagaccagcctggcaacatagtgagactgtctctataaaacactaacacgctaattaaataaataaaattcaaataattgatatatttgaattcgaatttcaccttgatatgtacattttgttttcctacctgctctatgttcttctctccttctttctccctctcttttttagtgaaagtgtctcactatgttgcccaggctggagtacagtggctattcacaggtgcaatcatagctcactgcagcctcaaattcctaggctcaagcaatcctcctgcctcagcctcctgattagctggggctatagacagtgcatccacatccaacatctatgttcttcctgaacttttattttgccttcctttggtttgattagtcatttatttactattcaattttcccctctgttagtgtggatggcatatactgtgacagccattctgcatgtttacagacattctggctgtctatcctgggcacaaggtcagactgcgtttcctaaccactcaagtaatgtgtggccatgtaactagctttgaccaataaaatgtgagtataagtgctatgtgtgtgtcacctccagatggagattttaagagccagtgtgtatttttcctctcttctctgtggcaaggttattctatcttgcaaggttcaaaatggcagctgctttatcagccttggctcctgcctgactacaacccacccaccatatctccaaccacacccgctagctggcagtgcacccatactgggatggtgaaataaattttagttgtttataccactcaggtctccaggtcttgttatgaaagcagagcctggcctatcttggctgaaacaaagatttgtgtcagaaacagggtgctgccataataaaaaacctaaaacgagaaacataggttagggactgggtggtaggcaacaagatgaatgttatcagaagctagtaggatgtgatgctggtcaagcagagacaaacagaaaattgcgacctgtgaccatttaagagacagataatgagttaataagattgtggctctagaagctagaaaaggggctagaaaacagaattgttgaagagtatgcttttgataaggtagaaaaaaaaagagagatgaactttagaagataataagggaatcaggctgggtgccagggctcatgccagtaatcccagcactttgggaggccaaggtaggtgaatcacttgaggtcaggagtttgagaccagcctgaccaacatggcgaaaccccatctctactaaaaatacacaaattagctgggtgtggtggcgtgtgcctgtaatcccagctactcgggaggctgaggcaggagaatcgctttaacccaggaggtggaagttgtagtgagctgagattcggccactgcactccagcctgggagacagagcaggactccatcttaaaaaaaaaaaaaaaaagagaatagaataaggtaatcagtccttatgcaggcagcaataaaggaatagagataacctagaaattgagaaacttgaggcagcttctcatcctcaccggtaacagacaaccctgagaacttgtttatctgggtgacgggattactacagtttggtctggtgaccaaactgaatcagcatggcctatcacacccacttcttgaagattaagttggcatgcagtaaatcccttcagttggacaaaattgctgtgggggctaagactaaaggtgtggctctcccacgaaccgaattacagcctcaaggcctctgcagttaagttgagaaaaagggccatgtctcaggacagaaccatggatgtggcttttagcacgtggagaggattcaaacagagaagaaggtaactaggtttttgagaaaggtctactgaccaaaaaagtataagcccatatttaaacagtttgcaaccgttcaaatcttctaatggtcattgagtctcagctacctagatgcaggactgagagcattctttccttttcttttcactgtcttccttggtcacacatgaggggacattgagaataggctttctgtgggggctgagtcagttcctttgcagcttcctgcttttgctttgcctccttcaagtaccagaagagtagcactgcagaaaacagttgaaaatccctgatttcatcccagtctcattctatacatgggactctaaggtccagacaaaccacttactggccctggctgtgagattgggactcagagcacctgactcacaacctggtccactgtagccctcatcaaggctctggtcaagtcttcccccttcttgggcctcactgctcaccctctgagtctctctaccgtctcacactgcctccttcccactctccctgcctctaaccaactgtggggtctcattggatttggtcagtgttgatcttggaatgagtatcttttggaagttgataatgtacctgcagttttccatgttttgagatgtgttaaaataaaaactataggaggcccttgttttggacaaagctctgcaccaagctccaacaaaccaaactaaaaatcagtgtggagtcaccgtgataacgttccacttcaccaaatctaaactaagttgttttctgatcctcttagagattaggagagaggtaaacgccaatttcccaaaaagtcctgttccagtctttaataggcatgataatgaagttcctctgctttaatccttacaccaaaaaaaaaaaaaaaaggtagcagtaacctgacattaatcagttatttttctactgttctatctccctctcccaccttataagaaaagtatcttaaaaatgattaacatgttctttgatctttgcttgtctttcttcagtccttctctgtctataaagtcaaccttgtcagaacacttatgtattttatggaatgaagtgttgcccaattccagaatcaccgataaagccaattgagatctttaagctaatttgttgtcattttgtcttttgacaggtgaaacttacgggatgactttgatgtcctctttgccatgcaggatgtagtcaatgaccttgtaaaagttaatttcctggcaaaagagagaaaaattatacttttttttttttttttttttttgagacagtttcactttgtcgcccaggctggagtgcaatggcttgatctcagctcactgcaacctccatctcctgcgttcaagctattcttctgcctcagcctcccgagtaaatgggactacaggcacgcaccaccatgcccggctaattattgtatttttagcagagtcagggttccaactcctgaccccatgatctgcccacctcagcctcccgaagtgctgggattacaggcgtgagccactgcacccagccaaaaaattataccttcaagagtcaaatagaagttcaacaggagtatgtccctgaaaccaactttgtccttttaccatcgtatgccccgtagtttttgttgttttaataaattaatgtttttattgatatacagtagttgtacatattttgccccatggttttcaggaagtgccaagcctggccataaactccctccaaggatgtgcctgggctgccttctggtgctccctgtcctctgctgaccctcagaattcagcgtgcttcaccttggaggcagctcacagtgatcaggaagagggctgggatctgaggctgggaagagggataggaaatcctctaagaggatctggaggttgattgtgtgcaagttgatcacacaagttgggacatttttgtcatacccaaataaaagagagttgagaagccagggggcaaaaaagtactcaggacactagcattgctcccagaatgtaattctttgcatgcctggctgcttacgctacctgctgtgacttgaaaccagttttatctgatagttgctgaaacaacctgctgcaactctaggactaattttacccactgccattactcatcagtcaaaacttgccagctccccagacccttactggtgtcaatgaactttctcagagagcaacatgtaatatttctcttttttcttttaaacacagggtcttgctgtgtcacccaggctggagtgcagtggcacagtcatggctcactgtagcctcgaattcctgggctcacgtgatcctcctgccttggcttcccaaagcactgggatgacaggcatgagccaccatgcccggcctcatttctcttttttataaaaccgtctaccttctcttttttctttggacatactgaagactacttagtctgcatgtatgccccaaattgcaagtcttcctttgccccaaaacattaaatatagagattcgtctctgcgttttaattttgactttgataagtgcaagaagaaagagataaagacggctgccagaatctagggagatggggaagtggtcaggaggttcccatcccatttaaaatcacagccaaccagccatcctccctgcagggtgcatctctatgtcatggccccatttctccttcatgcctaccactcagctgttctctttgctgtgtcgtcacttcagacctaccttctcatcatgtttcatgaccccaaactaactctctgcctcttccatctctcccgcctccttgcattgttaaaattcccattctcttaaagcagagctcttcaattacattactctctagcatgcaattggatgttggcatgtgactccattcccctagctctccaggggaaattctattacctttttcttaggtcctctgtatgcccaagcgtgatgagcaactatttcacaaatgagaaagctgagacacagagagaggaaaggactcacttgtagcaagacagtgaaccaaaatcagaacctgggtccttaattcccagctcagtgcttttcctctatgtcacctaacgttaacagcttagtgttttactgtccgcatcactgtcaccttgaacagggttgctcagagtgtaatccctgggccggtgcctgtcttgtgaactctttactattccaggagaagataaaaacagaaactgagagtcacttaggaagttttgtaacaatttgactgagttagatcaggtctgtttaattgaataaaaggggatatctttttttttttttttgtgacggagtcttgctctgtcgcccaagctggagtacaagtgcagtggcatgatccaagtttatattttgtctgtctttatacaattttgtttttctaggaatatattttatcatatttttaaaagtagcaatcaaaacatactggaggcgtgactcactctcttgagtatgcctgcactcccctttcttgagtgtgtttttcacacacacaaaaaaaaattggaaatttttttaaaaagaaaaaccaaactgttcctttactacaggtattttgagaagtacctccctagagatttcagtgcagatacctgggctccaccccaagcctcccgactcagaacctccacaaagaggaattcctgaaccagttaaagatgtctgaaggtctgtttggttgacgggcaatcagcaatggtcaacttccaactcataagggagaggctctgctgctcaaagcctagcattggcggcagctgcactgactgaatacttctaggaggcgagctctggttaaacaaaaggcagaagctgaaaccactccaatggcacaggctacccccaggggtagtgagctccctaaaataggaagcatccaaggggagactagatgaacgctgaaatacaataaataaaatggagctgagactagacctagagtgaggattcctgttctagtttcggtcctactatgggtgttctctaggcctcagtttctctggctgtaaaattggaatggtggtatgtgtttgctacagctgttcagtagcagctctctttccccaagcaaagcatggaagctaattatatgaaactgtcctaatggaatcagggccgggtatatagagtccctgcccctttgttctctcttactccctttcctgtcctcttccttttctattaacccctggtcaaggcagctactgtggaactctaaggttctaaggacaatgggggagaaagaaaattgttttagaaaatccataaagaccctccaagctatgattctaaggttatgataagataggtagcaatatctctcaaagatcaaaacagacatattatttgacccacatgtggtgatggatcctagagatatactcccaaatgtgggtaaaagcattttttgccccgtccaagggtcttagctagactgctttaaaaagtctggagatgatgtaaggtctcttattaggaaagtggttgtacagtggacaccacacgtttccagagcaagattgctgtgcctgtgctgaaagggaaaggtgacaaaatattcagttaagtgaaaaaagcaaggcacaaaatagaatcatagcgttagtgcagagtggtggtggtggaatacgtatacttctctgtggatatctggatatacctaaatgttcctgcaaagagagtttgctaacagcagctgcttcacaggggctgactaggaggaaggtggcacttaatttcgtatggagtgaacttttcactgtgctcatatattatttttccaacatacaaaccaattttctttttttatattttttattttgctttattttattaatttactttttttgagccaggatctcattctgtcacccaggctggagtgcagtggcacaatcttggctcactggagcctcagtttcccaggctcaagcaatcctcctatcttagcctcccaagtaactggtaatacaggcacgcgtcaccatgcccggctacttttctttttttcttttttttttagttagagacaaggtctcactttgttgcttaggcaggtcttgaactcctggccttaagtgatccttctgcctcagcctcccaaagttcttggattataggcatgaaccactgcacctggcacaacaaactttcttaaaaatatttttaaatagtcaagttgtaccctataagcagttctagaaagcaaaggtggctgctttctagaacacttatttcctaggagataagtttctgcctgcgagggggaggaggcagagttccaggaccttcttgacatctttgtcttgccttagggccacctgtccttgggcctgtgctgctcactgtactcctggcaggctcagggcttcctgggcctggctgctgtcctacccagggattcccacgagagtctttagaaaggttagaaatggacatttctaggccgggtgcggtggctcgcgcctgtaatcctagcactttgggaggcggaggtgggcagagcacttgaggtcaggagtctgagaccagcctggccaacatagtgaaacctcatctctactaaaaatataaaaattagccagacataatggtggggcacctgtaatcccagctactcgggaatctgaggcaggagaattgcttgagcccaggaggcggaggttgcagtgagctgagatcatgccactgcactccagcctgggcaacagagtgacagtccatctcaaaaaaagaaatggacattttttttggaatcccacaggagaaaaactgcaaagtttttctttcccagaattaacaaaaagatcagtgtgctttgggtaactaggctttttccactcactgtatctcagtcaaagtctttaaagccatattcatgtacaaattcaccagcctctggaaagtcaaaactgagtcatcaagagtacctttgttaccttctacctgagcagctgacacaaggggctttgaaagagccacagatacccatggaaatacaccactttttaaaagactgctatttttttttccatgaaggctttttagcctgtataacttttaaatatttaaaacatacacacactattttatttttaaaagtagatgaagcaagatgtagctgacactgtgaggctttcgacctaagattcgggaacattaattggttggaattcagacaaaagctgtgtttccaagtgaatgtggcagataaagcgtgagagggatgttagaaggcagagggaatgttaaagggcctaatttaggccaggtgcggtggctcatgcttgtaatctcagcactttgggagctcaaggcaggaggatcacttgaggccaggagttcaagaccagcctgggcaatatagcaagacctcatctctatataaaaaacaaaaacaaataaaataaaatgctgcaattggatgagatcagagatcagaaacttaaatgcctagagaggttgataaaaacaaaaatgaaagcagggcacagatgtacataaaagagagtggtgggggccgggcgcagtggctcacacctgtaatctcagcactgtgggaggccgaggtgggcggatcacctgaggtcaggagttcgagaccagcctggccaacatggcaaaaccctgtctctactaaaaatacgaaaattagccaggtatggtggcaggtgcctgtaatcctagctactcgggaggctgaggcaggagaatcacttgaatcgggaggcagaggttgcagtgagccaagatcacgccattgcactccagcctgggtgacaagagcaaaactccatctcaaaaagagaaagtggcggggactgtggcaaactagagaactcaggccacatcccaaggaggtagctgctactcagctccaatcaaatttgccctgctggattgtgggtccagtatggattaatcatccaccttttcaaaagaaactgagaattcaggtatttatggaaagactttgatttttaagggttagccgccaatttcccagcactttgggaggccaaggtaggaggatcacttgagcactaggaagtcaagaccagcctaggcaacatacaaagaccctatctgagagagaaagagagagacagagagagagagagagagaagaaaagaaagaaagaagaaagagagaaagagagaaaaagaaagaaagaaagaaagaaagaaagaaagaaagaaagaaagaaagaaagaaaaagaaagaaaatagaaaacctacgtagccaagcaagtgtatctgtcagctggaattggctttctggctaccaatttgtacattatagactagatatgaaggttttctaagctcatattgtctataactctaaattcctgcaaggtgaagccttgagtaggttgcttgacctttctgggtctctttccacagctgtgaaatgagtatgttggtccctgtttggtctaccccgcaaggttactgtgaaaccccaataagatattaaacacttagcttcttgttagtatagtgcttagaaagaaagaaagaaaaaggaaggaaggaaggaaagcaggaaggcaggaaggcaggaaggaaggaaggaaggaagaccactttgcaaatgttagggatgttagggcatgacaattatgaggaattattgttgctgttttttttttactttttttctctctgttgttttattttacttttagcacctgtctgctattgaatatgagagattattctaacttcaaaggagacaacccaacgcaaagacaaatacctatatgctaataaaaaatcctttaacagggtttactgtgccttgcatttgaatatattaaatcatactgaaaaggtcagagagaacgtactcttccatccggagtcctgggaccagagtaaggtggaacttcacccatcagaaccggccacacatcaaaaaattcctaggaatgagaaaaacaataattacatgttttgaaaagagatcaaggaaaggagattaagatgtcccacctccatgagtcagctaacactgaaatttagaaagtgagaagaactcagtgaaacctaaacttggaaaggcagtaagactcactacagttagaaaatagtcacatttgcccttcaaaatattgatgaactgggcctgtctagtcattagccaaaaacatgggagctgaactggggcaccctcagtgttattggacatgagagggaaagcagggtctttacggctaagaaatttaccttaagaccatgctaatatgtgctcaaagatttagctaaaacaatgtcccaagcagtatcatttatagtagtgaaaaattagagacaatataagtgcccaagaagaaaggacttattaaatcaattatggtacatctattaacaatgatgttacagacgtgtgtgtgctgattggaaagatgatacactgataagtgacaaatgtgagaggccaaaaagaatatatcatgtgaccctaatgttcaattatatatagaaactgtcatgaatacatttacaacaaattattattattattattattattattattttggagacagggtctcgctctgttgcccaggctggagtgcagtggctccatctcagctcactgcaacctccacctcccgggttctagcaattctcctggctcagcctcccaagtagctgggattacaggtgtgtgccaccacatccggctaatttttatatttttagtagagatggggtttcaccatattggccaggctagtctcgaactccagacctcaggtgatccatctgcctcagcctcccaaagtgctgggattacaggcatcagccaccatgcctggcccacaacaaagtattaacaagtgattttctctgagtgattggaatcagactgcaatttatttagaaatttttcataacaaactttattgcttttgtaatcaggaaaaaatatttttcacaaataagaaagaaaaaaatgatatcaaatatggacaatagacctatatctgggatccaataagaaaggctgacacctgtaagataagtggctgctaaagcaaaatacacaggtgccttagcctgaggctatctctgttcttccagtttccatgtaataatttgagctcctacaaaagaaactgcaacctcagtaggcaaacaaaccaaaacccaatttaggagtatattactgtaacaaatggtcgagtttcaaccaatcacaggcagcccaactgatcagatcatgtccaaatcagacaaatgccctattgtaactaatcatgttatttctatactttacttccatgttcagctatgaaagctcactggccttgctgtgcagcagagctctttgaacctcttctggttttgaaggttgcccaattcatgagttgttcgttgctcatataaactctgttgaatttgttttgtctaaaagtggccaaggtcgggcacggtggctcacacctataatcccagccatttgggaggctgaggcggatggatcacttgagcccaggagtttgacaccagcctgagcaacatggcaaaaccccgtctctaccaaaaatacaaaaattagccgggcgtggtggtatgtgcctgtaatcccagcttctcaggaggctgaggcaggagaatcacttgaacccgggagggggaggttgcagtgagctgagattgtgccactgccctccagcctgggtgacagagtgagactctgtctcaaataaataacataacataacataacataacataacataacataacataacataacataacataacataacataacataacaaacaacaacactaaataaaagtggccaagacacaggcagagggaagaggaaaaagagccagcaaaggagctgcacagtcatgcagcctcaggagaggccaactgagaaccacacaggttcttccccactacttcttcatggtttcctttgcccatagagcagcaaagcttgtgtggggtcaagtctgggcctgagagaggggcttccatcctccagtgccctttctgttcattcatctgttactatacagggacaaaccgtgatctattagcactgggttactgtgggtaggatgccaagccctcctcattcctctcatttgaacatgtttgtcatggtctgcttattctaatatcatccagagaagcagaagggaagccacatgaaatgcagagtccatgtttttgcccttctccccagttgagctctttttctagactaccaacaacaggaagaaatttaattctaggtgaacatttagaaaacaattttaattctaggcaaaaatataaccaggccctacctgagccccacaacctgctgactgctagttatacacaggcgaataaggcacagtttgtatcctggaagaacttattgtctcatgaagaagataactaatagtgaggtaaatgaggcaagaaccaaaacagtgctggaaggagaggataaatgctagaggagcccagaagaagaacaaatatattggcctgacacctcatgtgggccaaacactgagtggctccaaagattgtcccaaggagaagagaagttgtcaaacaaggggttgtatggccagcattgtctttagttataagaatatttagaaatagatatatatatatttagttataagaatatttagaaatagaaatatatatatatttagttataagaatatttagaaataatttttaatgtctagcaataggggaaaggataaattaattacggtatatttatactactcaaatgaatgagataaatccatatggactacaaaacaaagagagaggattcctacttctgttcatgatgactcgtttgtttcagaccaatcctccaactggaaaaattacaccatctggactgtgtgtatgtgtatgaacatttgtttatgtgaaggacttatatagccggcaaggcagcagggagttagtgggccaaaatcccagagagaaaggaaacccagagatgtaaacctgacccttgattcgacctttccttttgacccacttgttgataccaaagatgctgtgagcagctaagaagctgagccaagcttacggaagactcactgggcaaggaggacaaaattggaattcagagcctgccaaggaggagagacccttgaaaacaccctaggctgggatcctcacgccccaagaagtaaaagtgaaccagaagcagaccaggcctcacgaagactgaagaccagcttcacatcagttcaattcctaaatggattgaggttctctgcctttaccccaactgcttgccagaagtaaaaccatcccctttggaggaagataacatatttccatacatgtctctagtcttcaaacaaaaataataaagcatgtaacagacaattcacggaaaaatctagaggggaaacagatcatagaaataggtccatagaagatgcctataaatattatagctttcagacagagactcaaaaataactgtgattatgtccaagaatcaagtacaaaacagagaactttagcagagaactggaaactacaaaaacagaatgagttggaaattctaaaattgaaaaatatctaaagttaaaaactcaatagtttaacagtcaattagacactgttgaagagagagttagccaggcagtggctcacgcctgtaataccagcactttgggaggccaagacaggcagaccacttgaggtcaggagttcgagaccagcctggccaatatgacgaaaccccatctgtgctaaaaacacaaaaattagctgagcatggtggcctgcactcatagtcccagcttctcaggaggctgaggcatgagaatctcttgaacccaggaggcggaggttgcagtgagccaagatcatgccactgcaatccagcatgggtgacagaatgagactctgtctcaaaaaaaaaaaaaaaaaagagttagtaattaatagaagatggatcgaagaaatattcaaactaaagcacaaaaaacgaaatgatgaaaaacacacaaagaagtataagagacacaaaccatggtgaaaaagtctaacatataataataataaacttagaggtcttttcattaccagatatcatgatattttataaacatactgaaattaagacaggatagtattgcagaagaataggtaaatataccaatggaggctaggcatggtggctcacacctgtaatcctagcactttgagaggccaaggtgggcagattacttgagatcaggagttcgaggccaacctggccaatatggtgaaaccccatctgtactaaaaatacacaaattagctgggcatggtggcacgtgtctgtaatctcatctactcgggagaccaaggcaggagaattgcttgaacctgggagttggaggttgcagtgagccaaaatcgcaccactgcactccacgctgggcaaaagagtgagatatctgtcttgaaaaaaaaattaattaaaaaaaacatatatatataccaatggaacaaaatagagaatccagaaacagacccatacatatatggacacttggttgataataaaggtatgatagggaaggatgatcttttcactagaagagtagggaaagaatggtcttttcaataaacagtgctgggccaattggatgcttgtacagaaaaatgaatactcacattacttcacactaaacataaaaaagttccaggtagattgtagagctatatgtgaaagttaaaacaataaagcttttagaatttgacatatgtaaatatctctacaatcttagatccaggaaagatttcctcattacagcacaagaatcaatgactataaaggaaaagattgataaattgaactacattatcattcagaacttatattcataaaaacacaccattaagagaatgaaagcatgggccaggtgcagtggctcacgcctataatcccagcactttgggagactgaggtgggtggatcacgaggtcaggagttcaaggccagcctggccaacatagtaaaaccctgtctctactaaaaacacaaaaattagctgggtgtggtggtgggggcctgtaatcccagctacttgggaggctgaggctggagaattgtttgaacccgggaggtggaggttgcaatgagctgagatcgtgccattgcactccagcctgggcaacaagagcgaaactccgtctccaaaaaaaaaaaaaaaaaaagagagagagagagaatgaaaacaccaagtgggagaatacagtcatgcgtcacttaatggcggggatatgctccaggaaatgtgtgtttctttgggcaattttgtcattgtgtgaacattgcagagtgcacttgcattactccagattgtatagcctactacacacctaaacatagctaaacataaaaaacacagtaaaaataaggtataaaagtttaagaatcatacacctataaagggcacttagcatgaatggagcctgcgggactgagagttgctctgcgtgagtcagtgagtgagtggtgagtgaatgtgaaggcctaggacattactgtacgctactatagactttataaacactggacacttaggctacaccaaatgtatttttaaaatttctttcttcaatagtaaattaaccttagcttactgtaatttttaattaattaattaattatgttagagatgagatcttgctcatcatagctcactgcagattcggactcctggtctcaagcgattcttctaccgcagcctcttgagtagctgggattgcaggtatgagccaccaagcctggcttgtaacttttttactctataaatttttaaatttttctttataaaattttttatttttaaaaactttgactctcttgtaataacacttagcttaatacacaaacacattatacagctgtacaaaaatattttctttttaaaaaaatctcaaattctgttattcttttttctttttttatgtctttggtgcttgaatcagaacaaaaatatttgctttatatctttatcctacaagctttttttctcttaaatttttttttcttttactttctaaacttttttgttaaaaactaagacacaaacacacacattagcctagacctacacagggtcaggatcatcaatatccccatcttccacctccacactttgtccccctggaacgtcttcaggggcaaaaacacgcatggagctcccatctcctatgataacaatgctttcttccagaatgtctcctgaaggacctgcctgaggctgttttacagttaacttttttcttttttaataagtagaaggagtcaactctaaaataatggaaaaaagttgtagtatagtaaatacataaaccagtaacatagttttctagttttctattatcaagcattatgtactacagctcataattgtatgtgctatatatatatatatatatatattttttttttttttttttttgagacggagtctcactctgtcacccaaactggagtgcagtgagtggcacaatctcggctcactgcaacctccacctcccaggttcaggcaattctcctgcctcagcctcctgagtagctgggattacaggcacccaccaccatgcccagctaatttttttatttttagtagagacggggtttcaccatgttggtcaggctggtctcgaactcctgacctcgtgatccgcctgcctcggcctcccaaagtgttgggattacaggcgtgagccaccgcgcccggcctgtatgtgctatacttttatgcaactggcagtgcggtaggtttttcttataccagcatcaccacaaatgtgaagaatgcgttgcactatgacatcactagacgatagaatttttcagctccattataattctatgggaccatggtataggcgggccatcattgatcaaaatgttgttatatggtgtgtgactgtatttgcaatgcatgtatttgaaagtggacttgtgcccagaatttgcaaagaactcctacaaatcagtgagataaaaaagacaatgtgatttttttaaatggaggagaaacttgaacagtcacttcaaaaaataatacatccaaatggccaataaacgtattttaaaatattcaacctcatcagtcattaggggaatttatgttgataacaaaagagataaagccacatgctcaccagaatggctaaagttactaagaataataataccaagtattgatgaagaaacccttgatacattgctggtgagggtataaaatggtacaatcattttgaaaatcagatgggcaatatctactaaagctaatactctgaaattctacttctaggtaaatacctaacagaaagggcacaactgtgtactagtaatatactagaagtttcataataacagtattaataatagatcagatctgaaaactcaaatgtccaccaacagtggaaatgaataaatacactgtagattgtacatatgatggaaaattccacaggaataaaaatgaatgaactcatgctaaatgaagtaataagaatgaatcaaaagaagtcaaacaccacgcctgtaatcccagcactttgggaggccgaggcaggcggatcacgaggtcgggagattgagaccatcctggctaaaacagtgaaaccccgtctctactaaaaatacaaaaaaattagccaggcatggtggtgggcgcctgtagtcccagctactcgggagactgaggcaggagaatggcgtgaacccgggaggtggaacttgcagtgagccgagattgcgccactgcactccagcctgggtgacagagcgagactccgtctcaaaaaataaataaataaataaataaataaataaataaaagaagccaaacacaaaagcatgtgtattgtaggatttcatatatatgaacctcaaaaaggtaaaactaatatggtgttaaacgtcagatggtggtaacctttcaggaggaggctgtgggaggtactgaaaaaggtatgaaggaggctgctgaggtgctgtttgtcatgttctgttccttaattttggtggtggtttcatgggaatgttcactcattgaactgttatatcagcagctataattaatgtcccttttctgtgtctacgttgtccttctttttttatttttattttattttttgtagagacaggtctcaccatgctgcccaagctggactcgaactcctggccacaggccatcctcccacctcaacctcctaaagtcctgggattacaggtgtgagccactgtgccaggcctatgtttcaatataaaggctcattaaaaagaattcctatgtgctgacatggaaagatgtttgtaaaacattaagtaaaaaatggcagactatcagaaaatgcagtccagtaattttttaatcagctcttcagaatattctgatgaactgccaagtttgggagcctctggactatatccaagggcttttccaaccccagattctgtgatccatgtattcactcaatccaatatatttggagagtctgcattggtctgggcaccaccctcagcatgacaaggcgtacaaaatgaaactggctggaatccttgggttttcaggataggagatattaaacttagataactctgaaactctgtttcaaggcagaaaatgattagcctcataaggcagaagcaaataaacaaagagaaatgaggaagttgtttgggaaaacatatctaaaaaacatcgctgggagcgacatcgaactctgcctccttagctgctgtatctgccacaaatctggcccctgaacatgtgagggacccgatgtcggcatctgcctccacttaattgcctgggtgagctctggaatagataaattgcagcaaagctttacacacaactttcagtacattttttgagaatccctgaagttggcaactttctcctggactctcaacccacatagaaatttctttatcactggccttcatcacctcatcagtttcttttcatgtacactttttttctttccaaatgactaaggaaagtacagattgttttcactcacctgtgccctagattgacttttcccctttaaaggctgatactcctcagtagagacctatgtaagactttctacaaccatcccaattcacccagcctcttcccccgtgcaattgaatgtgtgccaagactctagccgtcagtcagtgtctgtttaatcttttcttggaaatgtctgttgctgaagttttctcaccttctgcttggtcatgtctaagagacccacagagtatctgtcacagttgaggaaagcacggactgtgtacagggctttgtggaactgtcgttcgatgtccgtaagttcttcaaagactttgctcccagaccacagcagtatctgaaaaaacacaaaaacatattcataggttttgaggtgcaaagtagtagctcacttagctggagaataacaacaattctgtaaagttgtctggagtttatttcatttacccttcacaataatccagagaaatagacaggttaactatcccctatttttacttttagatttttttaaagtttttaatttttttttttgctttggttgacagtttattaaatacactacatttgtaccttattctgtagtttttaaaaattgttcacacatgaactgagtaaaaacgtactttatagaaaaccaagtacaaaactaaaatgaaagaatgcacttattgcacacatattaaactgctgaaatgttagaaattaatctgtacaagtacctaatgaagaaggttatgaaatattaggtggttcgagtttctcaaatctggcaacagaccatgactttgaaagtgttaatgttgaagtgttgatggaaaaatgtctattaacaaaactgcttacagtgtttgagaaacacgacaaaataattgtttttctttcacagacatttttctaaatcaattctctacagactctctcccattcagaatcagttgtgtggaccgatgaggcaaaagatgaattccttttaaaaaacaaaactggagcctatttacaaaacatgcaaaaggagaattttaagcaggtgttacctccagagtttctggaagaaatatattttcaggttgtggactataaaatggcgtacaatgaagagacagaaacaaagaagtttgcaaatcttttatatttccagctgttgagataatatttttgagagctgatgttacctctagcggcaaaaccagagccagctattaagcagccagaaagctacagtaattgaatacacgaccatttctcttttagcacgttctttgttctcctcgtccggaagttgtagacgtctatttagtttgattatctgtcgtcttagtgaagctgcatctacaacagtcaggtcatctgatgttccttcaattgttgtatctgtatttgaaatgccataaagagaatcatttctgaccagctgtccattttggcgaacagcagtttcactcgtagaccgctctctttttagtcggccaactgcacggatttcttcattttgaggggttgtaggaggtctttctaaatccagaaaatctagtggtctttcacttagcctaagtacacgaggtgctgtttttagtgcgaggagtttaaagggagttgactgaataaggtcaagatctgctggtcttgaaaatgaaacatcctcattatttcctgctacaacaatcctctctggaacttgcattattatcacgctagcatttggaactcctttttggaatccctgttccaggttggcgtttggcggtgctacttttaacttttctgggaccctcattcgctgactaatgccttcagtatattccatttcgtacgaattcgactaatttctgccatctcagcagcagtgggagaaggaaatgctgccccactcaccaaatgtgtaccaactactgcttgctgtttggcactgtcggcttctgtgcttcatattaaatcctttaacttgcttcaatgtgcatgtgctggattgagagacacttttgtccccctccgcccacaggagggtcccggtgaggaccgccgccctccggctcccagggcgctcaagtgggcgctctcagaggcagttggccgagagcacggaggcgcccaggcacagcaccggcggagtggccagcagagggccagggcagaagcgcaaaagctaaagtgtttgtttttatgtatttattttttagggacagagtcttactctgtcatccaggctggagtacagtagcacgatcatagctcactgtagtctccaactcccgggctcaggcaattctcccatctcagcctccccagcagctgggactacaggtggacgccactgcacacagataatctttaaattttttgtagagatgagtttccacttctggcctcaagcaatcctcctacctcagcctcccaaagtgctgggattatgggcatgagccaccttacccagcccattatcatccatttattttaaaaattttattttaaaaatagagatggggtcttactatgtttcccaggctggtctcgaacttctgggctcaagcaatcttcctgccttggcctcccaaagtgctggaactacaggcgtgagccaccatgcccagtccaattatcttccatttgtagacaaacaaactggggctcagagagatgaagtaactggctgctttacattgggtccagctctttccctttcatttatctcataggtttttaataaaaataataagaaacttcaattgagcactattgccctatatgcattatctcgtttactattgatggcaaccttttgagggtggcaccataatcatccctatttttcaaatggggagactgaagcatagagagattaagtgactcacttagggtcttagagctaggcagtggttgagcagggattcagatcaaagccatctgtcttgaagcttgtgcatataaccactgtggtatacagctttacagacaaccactacctcataacactcgtgatgctggccagagactggcttcctaggcaccttcattcccatctgcctgccagtcctgaccacatcaatgcttcagggaaaggacgagtcaagtccattcccttggcccaagccccttacctggccacgtcgagtttcacagttgtgcaggtaactcaggtggtacaccttcatgattagatttgcaaaattgaggtacttgagaagaatctaaaaatcaaacagcatgaggggaggcaggtgagaagaagaaatccatcctctggctacttttaccatcagcaaatatctgaatattttcaaagcttcatcagagacaatttgggcagatggatcctagaatgcagactcataagatgttgcatgagcataaaactcaccgaatgtagaatgttgatgttgatgggagtgtattcatgaaaaatagctactatttattaataagttccctatgaggttgatactgaaaaattatcaacattttacaaataagaaaaccaaagttcaaagaagttaaataacttgcaaaaggcaaacagctattggcggagccagaacaattatccctctattcctgactccaaagcccaatgtcttaactattattttatcctgcctccctcagagaacatcaggtgaattccctgtcttacagatgggaaaactgaggccaggtcaaacagcaaagttcaggggacttcataggctgggagaatgtgctagcatggctatccttagtctctaaagcattcttacctcttcatctctcttggtgaagtgggatccatccactttattcacagccatgattatggccaccacatccttcccattcattatgggggaagccaagatgttcttggtcttgtactctgtgaggatgtccacaaagtcacagaaatgctcatcctaaaggaaggcagagataagcacggacaggcaaatgaagagcaagaacagtggaacggcccaaagcccctgttgacaagggaataaaggtgcttccatctattcctcttcaacaggggcagggaaatcagagatgacatctgtcatggaagcttccaaaatccagtagaagaagaaagtctgagatgaaatccactgagggctgtggaggagaggtgtgcaaagcagtgtgggttccagggatgggagtgggggactgactttgcctggagaaggagggttagagaaggctttcttgaggtgatgacaattaagcccagaataaaaacccagggtacagctaagaggaagccgggtaaagactttaggaagtacaacgacagttgctagcaggcagcgtgcatggcattttacctgcgttatcttacttttatcttcgcaataagctatgagataagtaccatcagtagcccatcttacagaagggggatctgtaactcaagaaggttaatgtcatgtgtgtagattgtgtagactgtgtgtgtgagtgtgtgtgtgtgtgtgtatgtgtaactccagagcctgccttcagctctgctgcctcttagagaagcctggataaggttagacttgggtctaggtcattgaacaaaagaatttgttattttcagctttttaaacaatccagttctagcaccacacaaccagttcagtagatatccccattctacgaatcttagtagaaaccccactatgtgtcaggccttatgttaagcacgggggatatgggtgaccaaggttcaggccagctcaaagaaaaatcaataatagtaatgtaggtcacaagggattggcttgaagctctgagtgtatagaggagcacacacctccataaacctcccctaatgcagcccagagaagccattataggctgtggtggaccatgcggtcaggatgaaaagacagagcttgaattgttctcttaaatttacaagaatcctcctttctgtttattggtagcactgtgaggtttttggactgtcagcattgcttgggaggcgggccagcccaaacatgctcagctcacgccgttctgagtggaaatgtacttcatagagccaattcacagaacttttctaaaactaagtctgggccaggcgtggtggtttacgtctataatcccagcactttggaaggccaaggtgggagtattgcttgcgttcagtagtccaagaccagcctgggcaacatagcaatatcttgtatctactaaaactcaaaaaaaattagccaggtgtggtgacatgtgcctgtagttccagctactcaggaagctgaggcaggaggattgcttgagcccaggagttggaggctgcagtgagctatgattgtaccattgcactttaccctgggtgacagagcaagaccctgtctctaaaaaaggaaggaaggaaggaaggaaggaaggaaggaaggaaggaaggaattcagagcataatgctctgcatctatagatttcttctagttggaatgggattaaataaatagtcaacagcattattatcagtgaagctgtttaaaaccaggtgaagggtaaaggaattaagagaagcttgtagtgctgtacttgaattaacatttgaggattaagcaaaatctctaaaaaggcattagtcaagaagtggtatctgtgtcattttctaagctactgatgagttcctgagcacgtgtctaggtggagtatgctcagattcatttcatgaagtcatttcagtttcccaatgttcacttctttcaggaaaagcaaatatttgggcctcacctgcatccaaggcagatgctaccaaatccaccagaaagctcattcccactgggtactcagtcctggaactcccctcatgagtacttcaactgccaattgactggcatttacatgatcattatcatccctatatattcagcatataaagtgttctaaacaaccatgtcacagaatctcagattatcaaaggcagaaggagacttagaagccatttagctcaaactagtaaaagtaatggcaagaaccacgattacttttgcaccaacttatatttattttaaatcctagaatcagaggctgagctagggaaagaccaaagtgattcatccattcagttagcattatcagagtgtcttccatatgctaggcactcttccagaccctgaaactacagcaatgaacattactgttgtaatataaggtgaaccttacattcaaacggcgagacagacaaaaaagcaagtaaacaactaggcattcttcctccaacttgaggaaactgctttgaaggaaatggactggatggtgctgtagagagtgatgaaagggatggcaggctggtgggtagggagccttctctgaagatgtaatgctgagctaagagctgaaggatcaagggagccaggtatatgaagcacattctaagcacggagcatgcaaaggccagcaggtaggaatgaggctggtcctcgtgaggaacagaaagaaaatcagtgtagctaaagcatagagagggagagggaaagcagagggcaaggaagttaaagaggcaggcaggggccagatccagcagggctttggaggccatgggaaagagttttgatttcatttttatgtattcacttatttatttttgagacagagtcttgctctgccatccaggctggagtgcagtgtagccatcatggctcactgcagcctcgacctcctgagctcaagccatcctcccacctcagcctccagagaatctgaaacaacaggggcgtaccaccatgcccgactaatttttgtattttttgtaacactaggattttgctgtgttgcccagggtagtcctgaacacctgggctcaagtgatcctcccacctcggcctcccaaagtgctggggttacaggtgtcagcctgcacctggctgagtttggattttaaagtgcaatgcaacactacttctcattcccagattcctcatttcccctttgcaaacattcacagtgccaagctctgttgcatctcatgatgagatctactatttactgagtaataatgactaggctcagagccagacaactgacatatattatctcattaactctcacatcagccctgccaaatagaactgccacctttcccattttatagacaactcccttgctggtaagtggcacagttgctccacttattcattcattgacttattcattgattcactgattgacagattgattcattcatattcattgagcactcactatgccaggcattgtatatgcaaagacctgtaagatgaggttgttctcagtgggttctcatggtatagtggaatgtcatgcaaaacatgagcccacgactcaaagcatgtgaagcagaccacgctggggacccagataaggagaaacttgtcctatgagtggcttcaagggccactcagtacattgtcagtagttgaaaacactctgaacctcaatttcccctttgctgaagtcagagtattgaataaggtcctctgtgaaggttttttttttctttgttttcctgttctagcctgctaggtctcaggtctcatgggaaatgaaggaaagcaggggcagataacaaatgtgagagggtctacaaatgacggtcatctcaggtacagccttcagaaatggaatttattagccagaggaagtgctggtgaagggctgacatttagtcattcactcactcaataaactatggtaagtatgcactctgtccaagacactgggctaggtgccaggggccagtggtgaataagatcgacagggacagacagacagacctcatgggttttcctgccaggagaaagggcaaaggaatgatatacaagtaaatattgaatggcaagtgggccttcccaatgaaatttgaatttcagataaactataaataattttttagtgtaactgtgtccaaaatattgcacaggatcttctttaactaaaatatcattctttgtttatctaaaattcaaactttactgggcatcttatattttttctggcagtcctgtggcaaatcttcccaaggcaattcccaagataagtaggaatttggagggggtggggaagttcattacagcccaaaagaactacctttgtgatttcgcatttcaacaatgcagcaattgcaaccatttctcaggtttttggagggtgctaaaggttgagagtatcactttttggtggtccagaaagaatctagacccctgtctacaccaccttccttctccttcacccagccccagtcactgtttggtggcgaaggttgcattctgccactggggcccaaggttgcattctgcccagggccatgaattgagtaagatttcctgaagtaaacacgtgcaaataccaagtacgcagggatgactggcctagacagacttcacccacaggcccaagtcactggccagggacactgactcaggccccaaaagtttccagggaaggtgaggtgtggtttcctgggtaaactctgacggatgaacagaaagcaacaggccgtcccttagcacagaggctccaaaaactgttaagtcaggatcttctagactcagaaaaacaccctgaatcctcaatcccttaacaccaaggtatagagaagctctcagcatttatgttctctgttttcccacaaacagaatctaaactgaaagctccagaagggcaagactggattcttctccaaattccactcaaacctggtacagcatccatcacttagaatagatccttaacaacgacaacaataacagtagcaaaatggtcgtaatagtaataaggaacgggagctgccaataggagccattacggtgtgccaagaacactgctgatgagataattcattcatttaatttctacaacaatgctgtggggtagctcttatttccccattttataaaataggaaataaacccagtcaagctaaacgatttgccaaggccacattctttgaaagtgacagagtcctggttcacatccagatctcaccttaaagcataagatcttaactctctgctacatgatccaatgaccttgctcaaatacccagtgcgatgccctcattttatagaggaggagggagtacagaatagcagagcaattaagaggaattaaggctctgtaacgactccctggctgaaccaactagttaaaaaaaaaaaaaaagattgtgagctcaaggtcagaatgcctgagttcaaatcattcccagtctgccacttttttttttctttccttttttctttttttaggctagtcgagtgaagcagtaggagtggagggggaacaaagaaatctataactggctgtgatcaattagttataaacacctgtgtacttgaaccagccaggatctgccactttctatctgcataatcctgagcaagttaccaaaactttctgggtttctgtttcatcatctgtgaaacagagataatgacagttatgacatagatcgttatgaggggaaacgagtgaggcaatccttgttggctacaattacagttagaagagttgaagggagaatagactccagtccagttggatgagtcctccggaaagtctcctgagtggagaaccattgcccggcccctggatgcccaagaggagatgacgggagccatgcgcccatgtgggagcccaccgggtatgctttccacagaggcacaagtctggcttatctcactaaggagcccaagaccaaaagatacctgtttgaatccttttttttttggagacagttttgctcttgttgcccagtctggagtgcaatggtgcggtctcggctcactgcaacctccacctcccaggttcaaatgattctcctgcctcagcctcccgagtagctgggattacaggcatgcacccccaggcccagctaatttttggatttttagtagagatggggtttcaccatgttggccaggctggtttcaaattcctgacctcaagtgatctgcctgcctcggcctcccaaagcactgggattacaggtgtgagccactgcgcccggcctacctgtttgaattcttgcattcatgcatgtggagcattggcaagcctctgcccacactctcctaggtttagtttccttgtctattaaataaggcagttggataagacagtctctgaagcccccttcctctcctatttttaaccttaagatgcttaatctgaagtaactccagaggtaaaatgagcacaaaatcacaccatgtccaaaggctggattttggaaatgccggaacacagctcctggtttggccagtgtaggagtgaataagacccgcatgggccctgccgtaatgggacaaacattcttctgggtgagacagtgttaaagaaattattgcataattacttgattgtgagtcttttacaccaagtgcttaccaagcacatgctttgtgccagacactgtgctgggtcctggagtaaaagcctggtggacaaggcagacctggtccctgacctccagggcttattatgagaaatggcttagggagggggctataacagggagattagaaagggcctccctgaggaagggtgactttttctgaaggatgagtaggagttggcctgggcagagggctatgtggagaactgcattactgcctttaaaaaccaacatccagagagggggagtgatttgcccaaggtgatcaaagaagtctttgtcagaaccaccaggagaatctcagggaacagtggatcctggaagaaagagccaagtgtttaaccaagtgatcagtgtttacacttccagtaatgggacagactgccattgtgcctccgcatgtaaagcacaaagaaaaacacatcacctctgtgctgctcctgccggaaatgtgtgacctgcatctaattatgaagaaatatcagacaagcccaaatgaaaggacatttctgcaaaagatttgatttgtacccttcaaaaatgtcagcaccgtggaaaacaaagacagactgaggaacagtcccagattcaaggagactcaaaagacagcgctacatcggtgtctgagacaactgacagaaactgaatatgaactgtttattagatcatggtgttgcatcttttttttctttattttttagcaatttttttcttttttccttttcacccagccgattggatggtagctttcctttccttgccttgccttgcctttcttttcctttcctttccttttcttgacagggtcacactctggcactcaagctggagtgcaatggcgcaatcatggctcactgcagcctcaacctcctgggctcaagtgatgctcccatctcagcctccagagtagacaggaccacaggtgtgcaccaccacacccagcgagtttttttattttttgtaaagacagggacctccctgtgttgcccagcctggtctcaaatttctgggctcaagtggtcttcccacctcagcctcccaaagtgctgggattacaggtgtgagccatcacacccagccttttttcattttttcctcttcattacggttcttgctatattgcccaggctggagtgcagtgtctattcacaggtgcaatcccactactaaccagcatgagagtttgacctgttccctttctgacctgggctggttcaccccaccttaggcagcctggtggtcccttactcctgggaagtcaccatattgatgctgaccacaggtgtgaactgaagggggccagcccctccatgagaaatacctgggtatttctcgtcaggtgggatgagagactgaggaaagaaataagacacagagacaaagtctagagaaagagcagtgggcccaggggactggcactcagcatatggaggacccgtgccagcactggtctctgagttccctcagtatttattgatcactatctctactatctaggtgagggggatgtggcaggactatagggtaatggtggggagaggttcagcgggaaaacatgtgagcaaaggtctctgtgtcataagtttaagaaaaggtgctgtgccttgatgtgcacggaggccaggtttatgtttgactttacacaagcatctcagtgcagtaaagagcagtattgccaccagcatgtcccacctccagccataaggcagttttctcctatctcagtaaatagaacatatgattgggttttacaccgagacattccattcccagggacaagcaggagacagatgccttcctcttatcttaactgcaaagaggccttcctctttcactaatcctcctcagcatagaccctttacgggtgttgggctgggggatggtcaggtctttcccttcccatgaggccatatctcaggctgtctcagtggggagaaaccttggaccatacccagggtttcttgggcagaggtccctgcggccttccgcagtgcattgtgtccctgggtactcgagactggagaatggcgatgacttttaccaagcatactgcctgcaaacacatttttaacaaagcacatcctgcacagccctaaatccattaaaccttgagtcaacacagcacatgtttctgcaagcacagggttggggctagggttacagattaatagcatctcaaggcagaataatttttcttagtacagaacaaaatggagtttcttatgtctttttctttctacatagacacagtaacagtctgatctctctttctttcccccacagtgcactaccacatccagctaattttaaaattttttgtagagacaggagtctccctatgttgcacaagctggtctcaaactcttgggctcaagtgattctcttgcctcagccctccgagtagatgggactacaggcatgtgccactactcccagcagataatggtgtcgtatccacattacatttctatgattccgtcattgtactgtggataggtaagaaatgtccttgttctggaagtactgtggaggtattgtggaggtactgtgtggaagtactgtggaagtactgtggaggtactgtggaggtactgtggaagtactgtgtagaagtactgtggaagtactgtgtatttccagaacagggacatttcttacctatccacagtacaatgatgggagcatcgccagtacttacagacaaagggcatgatgtctgcaactttctcccaaatgggtcagagaaaatggagagagaaagcaaatgtggcaagatgttaatgaatgataaatttggatgaaagacatacagttctctgtattatttcaaacttttctgttaagtttgaatttttttttcaaaataaagaattatgagtaaatatgtaaataaataaagaagaagcaccatgttgtcaccagccttgtcttggtggccaatgcccctcaccccacctgtaccccagaactccatgtaataatgccccatgccctctctctcatggggaagagagtacctcctctgtgttggggacgttagcaatcttcttagagtgtgcgacatggcccacgatgcccatgtccaaagggaagacgatctcttggtcgggcatcaccaggcagtcctcgaggacagcatccttgtggacattgaaaagcctggtggccagctctgcgatgccattgcgggtccggtacatgaacaggctcatgcggtctgcctgcaggaggaagcacagcttcttcatgacattgaagatgcatttctctgtctgtaaattctcctgaaagtcccgcaggagatcaaagatgatttcgctctcctccatgctgctcggggagtggtagttgctgaagtccacggcagcctccttggccccaaggaggtcggagatgagcttggcccggtagtggaggttgtagtactgtttggcaaagccaatattcgagtccaggaacttctccacctcctctgctgtcacctcgcccatggctgggaatcccactggctactctgtagaaggactgggacggaggccttccaatggcagttttgcagtctgcaacaagtccagtctggacttctctgggtcttgtctgcaaaacatactgagatggcctgcacaggagagggagcaagcttgggagattaagtcattaatatttctcaagaacaaggattatgaggatcagtgtgttccagatgctgtggggccagatgggagaaggtgagagttttctttcaccttggtctagtaagagcaaagaagagatgtctgcacagagcaggaggtgggcttgagcactgccaaagcaggggttgcaaaaaggcagcacagggacagtctacttgctgtaggtgtgtcttctctgacctctgttagttttcttaaatatctgacacagaagactgacatttactgtttaggagatttgtttggcttctctgtccacattcccccatggcgggaatggctgaagctgagaaatgactgcctgccagcctctgcatccccccggccccttgcctcatccttccactccccttcccaagggcttctcccatgtgggctttcaatgtgcagggcccctcggcctactgtcctcatgtacattatggatctggtatgtgtagtctcccatgtcacaatctttgcactaaagtttttatcagctttagatttcaatgactctaattttggcaacctaagggcccttataaaacaacacacctttcaggttttcctttattccaaaagtaatacatattatagtcactgttgaacatacacaaagaagacaattaaaatcacccataatcctgttactcagaggcaacctttagttaacattttatttttaacctgtagttaattctacccatttcacagagccttaactttaaaaatctgtttcccttcaacccactccaactttctcttggtgctttaatgtgttcttttctggtttcagcctgtaatttcttgggttgtctgtcagaaatacacacaaggggctgggtgcagtggctcacgcctgtaatcccagcactttgggaggccaaggtgggtggatcacctgaggtcaggagtttgagaccagcctgggcaacagggtgaaaccccatctctactacaaatacaaaaattagcagggcatagtggcactgcctgtcatcctagctacgcgggagcctgaggcaggagaatcgcttgaacccaggaggcaaagttgcagtaagccaaaattgcgccattgtactccagcctgggcgacaagacctagactttgtctcaaaaagaaaaaaagaaaaggaaagaaagaaatacacacaatggtccacattctagcaactccagtgaatcttgaaataccagaatcttcattaaaatgcccttcctgcccactaggaaggagacagagcacttttctttctggatgaaacttactttagcttccatgactatatccactatagcctggcacctctatgttgtaaactatgtggaacgcataattatagacagttgctagcactttgaacttcaaaaatgacctttactgggaagcagattgcctcctttattgtagagtgtaataaattcttggggcactgcactcatccagcagtgtgcacgagtgctcaccccccaatctggcaggctgtgtagcagcacaaaccttccagacactcccatcataaggaactggaactctctaacctaatgcgctttctcagctctctgcatgccatctccttcttaacttccagatttcaggtcatacaggtcatctctagttttcttatcccaagtagcccccaaataccctctccccggtttctgcctgtcatatcagcctatttattttttctattacatttattactatcagcaattatcatgtttgtttttgtttccttgtcctattgtctggcctcccactatactgtgagcttcatgagggcagggacctgtcagtgttgattccctaggccttgcaagggtgcctgacacatccttggtattcagtattgtgatattgtgatacatgtatttggtcttcaacaccatttccaggtaacacaacttctaaaatccttagaatctccagagtgatgtatttttgtataccaatgattgaccagtgcctggtaatccctaggtagcttcaggctgaggggctggtcacctgaaagactaaaccacaattagaggatgggactttcagcccatcctccaacctccaagaaggggaaaggggcctgaagctttagttgatcatcagtggccaatggtttaatcaatcttgcctgtgtaatgaagcctccataaaaatccaaaaggacagggctcagatgagcttctggacagctgaacacaaggaggttcctagaaggtggcaagcccagggaccgtgcaagcccagagtcccttccctaacacctcaccctatgcctctcttcatctgtatcctttgtgatatcctttataataagccagtaaaggttagtaaatttccttgagttctgtgagccactctagtaattaattgaacccaaagagggtgtcatgggaaccccaacttgaaactggctggtcagaagttctgcaggcccaaaggcgaggcacaggggaacagtcttgtgggactgagctctcaacctatgggatctgaggctatctccaggtagaaaatgtcaggatttaattgaattagaagatccaagtgagttgggctatacctatactattcaagaggctgaggcgggaggattacttgagcccagaagttggaggccagctagtggtctcctctcgaataataacaggtcaatcctgcttagctaccaagatcaggagacatcagacacattcagggtggcagggctatgaactctatatcatgaaaacctttcaaaggtatttccttttttttttttttttgacaggatctcactctgtcagccaggctagaatgcagtggcgtgatctcggttcactgcaacctccacctcggggacgtaagcgatcctcccacctcagcctcctgagtagctgggactgaaggtgtgcactaccatgctcagctaatttttgtatttttcatagagctaggggtctcactatgttgcccaagctggtcttgaactcctggactgaagtggtccacacgcctcagcctcccaaagtgctggaattacatgcatgagccactatgcccagcctgtcccattcattttaatgattgcaaagcatttcactgtatggaggtaccagaacaccacagtactaccgtccacagccaggtttctcaaccttgacactatcagcattttgggtccagtaattctttgttgtgggaggctgtcctgtacgttgcaggatgtttactctaatttctaccgctagataccaataacacccacctcaagttgtaacaaccaaaaatatctccagaaatttccaaatcgccccagttgagaaccattatcccatagttagatatttaggttgtttctaatttcctaatattagaaacaatgttgtaatgaacatccttatatttcttagtagaaaatacctagaagtgaaattccaggtccaaagagtgtgcagctgtctaaggagtttgataaataatgccaaattttgtctccaaggctttaccagtgtgaatgacagtgtctgtccctaacccttaacccacccctcaacaacatcctgttgcctagtaaattaaacactttttcttaatcctggcattaatagctctctagaatttgtccccaacacttcttattttgttttccacaatttctctacacatattccaagcttcaccctaatgttttcattctttttcggttttgcctcttcattcttgctgtgccctccacctgtcccttaccaccctgtccgaatgtcattacttctgttgattcttctttgatgtaccaactaaactctttttctactcacaactcccaaactattggtttccttccattctaaggggagtttctacatttcaggttgtgttatttctgcacacctgtactttcatcaaggacaaactccttgaactatagaagtaaaacttggcccattttaaaatgtctcctagagccaggcatgatggctcatacctgtaattccaactactcaggaagctaaggctggaggatcacttgaagccaggagttttaggctgcagtgagttatgatcatgccactgcattccagcttgagcgaatgagaccctgtctttaaaaagagatttcccaaagagctcagcacatgtccttttccgtagcatgtccaccagaaccaccaagttctggtgagaaatagaagcaacagtttgccaaaaaatctacttttatctcatttttcaacatgccagaatgaggaaggcaaggctgttgaaaaacttcagtctaattgctaggtaggtacaaataagttggtatttggagtgagtcacctaacgcctaacactaacttatgaaatggacctgatttcagacgtcagggaagaaactggtaatctgaagcttcttttattggcaataggggctaccagtagagtttggggagatgtcttgtgtaatctagtttagaaaagtgcatgtactactagaaagaggaatacgagattttaggtccagcaatgccaacgactcattttgtaactttgagaaagtcccatcctctctcaaggctttgatttccctatcaacaaaacaaaggagttgaataatttatctttaatactcccagttctgtgactccaggtgggctttgaatgagggaggccatcgtatttgctgtgttgtacagccatcaccactaattccagaaaattcccgtcaaccccacaagaaacgtcatacctattagcaatcagtccaaccttacttctcccactatcccctggtaagctctaatccagtttctctctctatgggtttgcctattctggacattcatataaatggatttatacaatatgtagctttttgtgtgatttatttcacttagcataatgttttcaaggttcatacatgttgcagcatgtatcagtattttattcctttttttcaccatgctgtgctgaaatgtatcattcctttttgaatgaaaagtatcattcctttttatggctgaataatgttgcattgcatagatataccctgttttgtttagccattcatcagttgatggacatttgggttgtttccactttttggctattatgaacattcttgtacaagtctttgtgtggacatatgttttcatgtctcttgggtatatatccagaagcagaactgctggttccacaggtgattttaagattgcaagttgggccaggcacggtggctcatacctgtaatcccagcactttgggtgggtggggcaggtggatcacttgaggtcaggagttggagcccagcctggccaacatggcgaaacccggtctctattaaaattgcaaaaattagccaggcaagatggcgtgcgcctataatcccagctactcgggaggctgagatgggagaattgcttgaaccctggaggcagaggctgcagtgagccgagatcgagccgctgcactccagcctgggcgacagagccagatgccatctcaaaaaaaaaaaaaaaaaaaaaaaaaaaaaaaaaaaaagactgcaaatttggaggtaaagaagagggaataaagaaaagaaacaggaccaagtaaggaatcaaatggatcaaggagagatgttttgcaaggtccctttttggaaaaaatagcactctgaaattcaggacctactagaatgtgaacaggctggtcagcatatgatcggccaccacaaattctagtgtggggtataaaggtctccacaggccattcatcactcttgcaaatagccatggtgaaggaactgggggtattcaattgtgaggaagctctgaaaggctgttgggggtgagggagggtgccagtttgttcaggaaggctccagagagcaggacaagccagcagatgagatgtacaggttgttttaagaagacagtacccagagtgcttaagaggtagagcttgagagttagacctggggcctgttatttgctaactgtgtaaattatttaatttctcctgggcctcactttgcttgtctgtaaaattagaattatttgacatggttgtttggagattaaatgagataatatagtaaatataatgcaaagctatgcacctggtgagtattaggttaaaccatataaaactgccaatgattatttttattctgcacaaatgacaatttcatactgttcaatttaatcataggtaatcaatcattactagttattgccactaccaaagactaactgaattacctcataggtagtgacctccctgtcattgaaggtatgagagcagagaacatggcaaagaggaatcaaatatcaatatttatataagaagatgaatctggggctagcaagtcaataaggaggctgttgcaatattcctggagtaatgaggacctggcccaagataggaggcaaaagaatggagagaaatgagcgggttagaagcaagaagtagaatgtggaagctacgctggctgaccaggagagggggcatgagaaagaatggtgcaagcttgtgtgatttgtgtgtccttgagcctctgtaggacatcccagaggcactaagtgtccccgttctggacatttcactggagttaaatgtcaacttagccttcatttcctaatggaagcctttctgctcctggcttgccaaaccctacctcctccgggaagccacagaagggaagacagtctcccttgtgaaccagcccttagaactgccagaacagccttttcggtctccaccctcattctatacttaccttagcacactcccacatctcatttgtgcttacccttgatctagagttgatgtcaattccacattgtctggccgcctgttgatttagtgattttatttggctacatgggacccattgggtctgtatccctgaagcttggctaatctttgaagttctctttgttttaccttaaggatctaatctggatctgcagatgagccatgaaaaagttcgtccttatgtgcattataaccttacgtcctttttttaaagccagattatgaaaggaatctatactcaaaaagagttgggaactttgagcaatcctgaaaagtcaggtaaaattaggtcccaaaaacatgctgtttggcaatagtcacagaaaggcaacagctaggctgggcatgatatggcatgtctgtaatcccagctacttaggaggctgagatgggaggatttctggggcccaggagttgaggttgaggccagccttggcaacacagcaagaccttgtctaaaaaacaaaaaaagaaaggcaacaggcaggaaggtatgcttaggcattggaatcagagagagctgagtttaaatccttttcccacaatttataattttgacactaggcacattatgtactctctggtcttcatgttctcatttgcaaattgtgggaaacaatgatacttattttatagagctgttgtgggaagaagcagtgtatgtattgaacctggttgatggccagctcttgatcaattatgctattaataatgataatgtaagctaaatatgaggcagtgatatttggtaaaaagaagaagtaatatagatatatttattttcttattatttttaagccaaaaaaaattttttttttttttgagatggagtctcactctgtcgccaagttggagtgccgtggcacgatcaaggctcactgcaacctctgcctccggggttcaagcgattctcctgcctcagcctcctgagtagtggggactacagatgcgtgccaccacgcccagctaatgtttgcatttttactagagacagggtttcaccatgttggccaggatggtctcgatctcctgacctcatgatccgcctgcctcggcctgccaaagtgctgggattacacgcgtgagccaccgcacccggcaagccaaaaatctttttaaaataaggtaatatatatttgtgttgcagataattgagaaaatacaagtaaacaaaacagaaatataacagttaccaccaagagaaacattttaatatatatcctttttttccaatcatgtaatttaaaaaatacaactatggttttgcaatacacattttgtttgtttaaaaaatatgtaaataggccaggtacggtggctcacctatgtaatcccagcactttgggaggccgaggcaggcagatcacgagatcaggagtttgagaccagcctggccaatatggtgaaacccgtctctactaaaaatacaaaaattagccaggcatggtggtgggcacctgtagtcccagctactcaggaggctgaggcaggaggatcgcttgaaaccaggaagctgagttgcagtgagtcaagattgtgccactgcacttcagcctgggcgacaagagcaaaactttgtctcaaaacaaagaaaagaaaaaaaataaaatatatgtaaacatctgtgctattaaatattcttttatcaagtgttttttttatggcctcacagacttccatagggaggatgtactgtaacttatttaacatattttcaactgttggttattttgactgttcattttttaaatgaacatttgtgtagttaaatctttgcccacttgcttgattttttttttatcttcttaatcaaaaacttgaccagaaagacagaacaaggtgatcctttaagatcttgtcctggctatccagaaatctgaatttaaataaggaataaggaaataataggaaagtcaatattttgatgcaaagatcatgtttcgttttgaatgaccatctcccacagctcttagcccatgtatctgaaagaacagatctgaatggtggggcttgtgactgctgtgaaatgtcagataacagatcgctttctgtacctaaatatttataacaagagagatttgtactccttcaccctgagtgtaagagtcacattacttttctttctccaaatcaaattttatttcaatttttaattttaattttattttttttaagtcagggttcaaccagactaaatcaaattttatatgctgtaagcctctaccccgcagtgctggcaggatattcaatcttaataattattgtgaccgatgtcccactccagggtcatgtgaaggtctattggccttactccagcctcataaaatccatcttgcctttggtccgctctgccaccacaaacacaccccacatctaagctggtatggccccggaaaggccagcagttctgctcttagccagacatcgggggtccttgctatggctgggacctcccactcccaggctccggcctcccggggcattaacagctaccctcataggaggctctccccgctctccagggcagagagtggcccgggttcttttcactcaaggatactgcaaagcccagaccctgtctccattttggggaaggctctcaaaaatctttcttctcgattacctggccctccattctctctccctctgaagcaattccgcctaatttccctccaaggccaacagcaggaatagatagttgctttcaaggccgggcgcggtggctcacgcctgtaatcccaacactttgggaggcccaggtgggcggatcacgaggtcaggagatcgagaccatcctggctaacacagtgaaaccccgtctctactaaaaatacaaaaaaaattagccgggcgtggtgggggcgcctgcagtcccagctactcggtaggctgaggcaggagaatggcatgaacccgggaggcggagcttgcagtgagccgagatcgcgccactgcactccagcctgggcgacagagccagactccatttcaaaaaaaaaaaaaaaattagttgctttcttgagcctgggcatggtagccttctgccctgccacagtggctctgacatacaagtggtcatgaagggccgagccccctctagggattgggtgagagggggcagaggaaaactattcacattcagagcactgtttgtaatattaaaagagtaaaaacaacctaaatgtctgtcaatgcttagataattgatgatacatgcaaacaatggaatactattcggctgctgtggccaatgtttcctgtcccacatccctttcttaccatgcaacttgtacactttgcccattgagacttgaggcctattcccctccccttaaaatcaggcaggcttttatgacttttaaccaacagactgcaacggaggtgaagctttgtggcttttgtttttgttgttgtttggcaaggtctccttctgttgcccaacttggaatacaatcgcatctttatagttcactgcagccccggattcttgggctcaagggattctcccacttcagcctccggagtagctgggaccacaggtgcacaccaacacgcctggctaattttttttttatttgttgtagagaccaggtcttgctatgttgtccacactggtcttgaattcctggcctcaagcaatcctcctgcctcagcctcccaaagcgctaggattacaagcgtgagccactgcaccttctctctgtgacttttaaggctagatccttaaaggttatacagcgtccctgttactgctgggacattggctcttgaagccttcacctaccatttaatcacaaactgcccaaaactaagaaagcctaaactagcccctgcagagagacataaggagaagccctgcgactgtatgaaggaggaaagagctgtccagaaggcagtcagctgctctagccccgattctgtcccaactctagccactatctagagtcacattgcatctctctgagagatcccaagccagaaccaccctgcaagcctttgccaaattcctgacccacagaaactgagaaaaaaataaaaagattattgttgctttaagcttctaccttttggagtgatttattcagcaatagagagaaagcagctctgtatgcactgatataaaataatcttcaccacataatttttaaaaagcaacagaatggtatgtattctatgcccttcttgtttaaaaaatatatagggagagtcttatatatgcatacaatagtggtttgccaacctaggtgtgcttagaatctctagtggggctgggagctgtggctcacacctgtaatcccaatactttgggaggacaaggtgagaggattgcttgagtcaggagtacaaggccaacctgggcaacatagcaagactccacctctacaaaaaatacaaaaattagccaggtgtggtggcacatgcttgtagtcccagttacttgggaagctgaggtggaaagatcacctgagcctggggcagttgaggctgcagtgagccatgattgcaccactgtactccagcgtgggcaacagagtgagaccctctttcaaaaaaaaaaaaaaaaaaaggaaaaagaaaaaaagaatatcctggatagctttttttatcttttatttttaaaatttatttttattttagattcagggtgtacatgtgcttgtttgttacatgggtatatacatactggagggaattgggtttctagtgtacccaatacccaaatactcaaatagtgaacattgtacccaacaggtaatttttctttttttttttttgagacagagtttcactctttagcccaggctggagtaaagtggcatgatctgggctcactgtaacctccgcccctcgggttcaagtgattttcctgcctcagccttccaagtagctgggattacaggtggccgccaccacgcctggctaatttttgtatttttagtagagacgaggttttaccatgttggccaggctggtctcaaactcttgacatcaggtgatccacccgtcttggcctcccaaagtgctgggattacaggcgtgagccaccacgcccagccccgacaggtaatttttcaaccctcgtgctcctcttttggagtctccagtatctgtaatttccatctttatgatcttatgtacccattgtttagttcccacttataagtgagaacatgtgtctttggttttctgtttctgagttgtttttcttaggataatggccttcggctccacccatattgctgcaaaggacgtgattttgttcttttttatggctgcatggcaggcttttaaaaactatcaatgtctgagtcaataccaataaaagtatatctggtagtaggacctaaacattaccatttttttaaaagttccccaagagactctttttttttttttgagatggagttttgctcttgttgcccaggctgaagtgcaatgttgcagtctcggctcactgcaacctccacctcctgggttcaagtgattctcttgcctcagcttcctgagtagctgagattacaggcacccactgccacacccggctaattttttgtatttttagtaaagacagcgtttcaccatgttggccaggctggtcacgaactcctgaccttgtgcagaactgagaactgctggtatagaataaacctggaaagcaacacaggaaaatgggtgctgtgtttgcctctagaaaggtacaccagggtaagaataggctatgaggaagatttactttttactgtaaacccttgacctttttaatttgtttactttgtgttacctatttccaagaacaatcaagctaacattttacaaaatgttttgcaaaaaagtaaaatggcccaggcatggtgtctcatgcctgtaatcccaatactttgggaggccaaggtaggaggatcacttcaggccaggagtttgaggccaggagtttgagatcaggctgggcaacatagggagacccccatttctacaaaaaaataaaaaattagctgggtgtggtggcgttcggctgtggttctagacactcaggaggctaaggtgggaggatcacttgagtccagcagttcgaggttagagggatctataattgcgccactgcactccagcctgggtgacagagcaagaccctgtctcttaaaaaaaaaaaaaaaaaaaaaaaaaaagacacttatagcagtgaaaatgaagcctgaatagcacactaggaatagttcattcaatagtgggaatccagtgggagttcaaggtccagtggggcctcagaggaagtgactagtcccacctgggaagaatgggtggtcaggaatgctgaggaggtaaatcctgaagtggccccaacctgaaaggacttatttgctggcccaccatgcctccagtgcatacatcattagttacgctttggaaaagctgtttgggaagagtaatggctataaaatgtggccctccggctgccagtcacctctgtgaaccctgagaccaacaggagggaaaaaatgcccaggctaggaggcgtaaagagatccaagtgctgctgatgtgatgtcatcgaggaaaagctaattattggccagctttccagtagcagggatttagttattcacccccaccccccaccccacccctccacccgctgcctttgattcctgttgtggagcactggaacatcggtgaagggaaagtagcatggcagaccaaagtctggctccatggagctccttgggatgtgtgtgtggagatcagcgagggaccacaacagtaaacagcagccagggatgctgaactaggaggcagagaggcaccaatggccaacctaaagcttctttactagcaccttctcctggccccgggccatagcttgcatgttcttgggtgctggcatgtcacagctcccaggtcaaaatccacctccatcccatctcaaaatctactgcttgttagctgaataaacttggtaagtaatactattctgagccccaatttcttcgtctgtgatgcagatgaatatgtatgaaataaaatcaaagaatgataggcagtattaaatttgactggtctggttttttatttttgcttttgtttttatttttgagatggggtctcactctgtcacccaggccggagtgcagtggcacgatctcggctcactgcaacctctgtctactgggctcaagctgtcctcccaccccagcctcctgagtagctgggactacaggcacatgctaccatgcctggctacttttttctatttttggtagagttggagtttcaccatgttgtccaggctggtctctaactcctgagctcaagtggcttataggcatgaaccaccatgcccggccaaatttggccaatctttattggtgcctgttatatgcaaggtcctggcttccccacacagacaagaaaacaaacaaataaatgaataaatgtcagctgcaaggattggagtggattcttgcatttgcatagcacagtgagtgtagtggttaagagtgggctttgcagtcagacgtgactgtgttaaaatcatgctactgtcacttattaactgtgggacgttgggcagatcacctaacatctctgagcctcatttcctcaccaaaaaaaagaagaatcataatatggcacctcctctaaagctgttgtgaggattaactcatgtaatgaatgtgaagagttctgcgcaggcacgtgataaacatccagaaactgtttattctgcttgttgtgcagtctttagggcttaaacaaagtactttacactgattgccttacctgaccctctccaggactctgggtgctagggcattaactaccctttgaaaggtgaaaacattgatgcccattgaggtgaaatgatttgtcttcagccacaaggggcagcatcaggagtagaacccaagtgtttgtgttctgattcccaagacagcttatgacgttttggaaactctgaatctgatgggtgacagaaacttggggatcatctctagataagaaagggagttccttgaatgactgtgaagacgttcaccggaaagggaaggaaaggaagttaatcatgcttccttcacaggccctccttcacccccatctagtgggcacatgcaagctacaaacaaggtgaggaatgaacaaattaatacatactcaatagtggccagttcgaggcagataattaaatcaagatgacctgaaaggatgtgactggctgtggctagtttacacagggtggtcagggacggcctcgccatggagagggctggtgttttggctgagacctgagagaccagaagaaatctgatggccagaaccaatgtttaggtccctaaagagaacaagcgtggcgagcaaagggggccagtatgggtggagatcagcgagggaggggggcagagatgagtgcccgaagcacacagtaccttggcatagggagggtttgattttacctacaaatgccattaaacccactaaggattttaacaaaaactacaattacattttaatttacattttatgttttatagagacaaggttcggctatactgcccaggttgatctcgaacccctgggttcaagcgatcctccctactcggtcccccaaagtgctgggattacaagcgtgagccgctgcgcccggccttttaatttacattttagccttccggttactggaatctttgatggggaatgagttatagtgaggcaagagcctctaacattctaggagctcttttcccgttcggggcctcaatttcccgttctacaaaggcgggtgggagggaacggggtcccaagtagtactggataaagaggtggccgatcgcaaacgctgagcacttcaaaactctgggcagagcgcttccgcgcctctcctgctatttcaccctggccacaggctagccgccgaggccggtcatccgctctctccgcggaggagtcaacgccacggaagcagcggcggaacctctctaagaatccttccagcttgtgctcttctgtccagggcagccaatcgcgaggaggagagtagtcagagggcggcaccctccccggtctgggccgagttattggctggtggtagcgtcgctcgcccggcagtaccacgtgacggcctcggccgcgggcgtttacactggctctgcctccggcatctcttcgccggtgcgtcctcgccgcgcccgtaggtcccggcagccgggccccgcctccttcggagtccgagcgatgggcggggaaagggacaggcaggtatagctctgtcggcgccgcggtgtccacctcagtcaggccacggtggaagacgcgtgccgcggcgcctggttgcctgcagcggcccggacccgagaggtgagaagagggaagcggaccagggaagagggagggagcggtgctggccgccaagcggtcagcgggcccctcccagagtcattctgcctgggtccccgcgcggtagaatcccagatcaggggtcgccgccgtggagcggggcgtgcgtcaggttatttcccgggtggtccggggccgggcgagtggcactgcaccctggtgatccgggcctgcccgtctggctggcggctgcccacccgccctccatcccgcgtatctcgccgtatctcgccgggtgccacgcactccgctgcttttccagtcctcgttgatccgtctcgaacctagatatctggaatagggatcgaggagataggagccaccaccacctcggacagatggggaaactgaggccggcacaggcgagacggcttggttatcttggttattaaaaatcacacacccgattaagtacaaaatcaggacctgttctttcggactcacacactaagttggtattatttcactggatggatggaaacactgagaagacagagagggcccagagccttgcctaaaaatacacagcaagtcttttgcagagctaggacttgtacccagctctccaaactcatagactatcagcctgggctccttccttgcacagattggggatcacagtgagttagaaacattcagaacttaaattgccttccggcgcccattctagttaacctgtcttttctccttgtccccaacagttctttatgtgaaatctacaactaatgtgatatgcaatactagattaagcagaactttttgtttttgaaaattgaatcaataagaaatggagggccaaagctgtgggaaaggaatggaccctttaaaatcaggaatctcaaggcaggatatagcaagggacagagactaatagctgtcgtttattgagtaaatgctatgtgccaggcactgtggtaggtagttgtgttagccttacaaaccagcaagttaggtaatgttaccccattttacaggtcagaaattgatgctgagtacagtgaagttttacaaaaccattgccatatgactgctgagcagtatagctgggatctgaacagagatctgtttgacttccagaacacatccagtgattctccaagtgtggtcctaagctcactcgttcagcatcatctagcgtgtggagtcctggatctcatccttggatttgcagggatggtcctaagaagctaacggctctctgtatttgacaattattgtactgtaatgtgctgcctcctaggggaagatctagaggtgaacatactctgggctaggggtaatttttgagggaaaaaaatcacttttttttaatttctgatttgactttttttttttttgagaccaggtcttactctgtcatccgggctaggagtgcaggggcgcgatctaggctcactgcagcattgacctcgtgggttcaagcaaaccttccacctcagcttcctgagtagctggaaccacaggtgcacgctgccatacctggctagtttttgtagtttttgtagagatggtgtttcaccatgttgcccagtcaggtttcaaactcctgagctcaagcaatcctcctgccttggccttccaaagtgctgggattacaggcatgagccactgtgccctgcccacacttttattttttattttcccccatgattgacagaaggataatcacgcttttagtgaatgtaaacccccaggcagatgcttgccaagcttaatttcttgacataagcttggttttggcatgtgggggcggaagagtggggttggagagttaagtgagaatggggaaagtaactcctttttccttatcatatagctgttaaattctaattcactcaacagatacttgctaagcatttattaggtgcaagacatgttcaagacactgagaatacagctttgaacaaaacagagcaagtcagtgccctcatgtgaaagacaattaacaatgtgtggtatggaatggtgagaagagctatggagaaaaataaagggcataggagtgcaaggcagggctgggcccaggaggaagacatggaaatggcagcaatggcagtggtgctatatttatttatttatttatttatttatttatttatttattttttgagatggagtttcactcttgttgcccaggctggagtgcggtggcgccatcttggctcactgcaatctctgcctcctgggttcaagtgattctcctttgtcagcctcccaagtagctgggattacaggcacatgccaccacgcctggctaatttttttttttttctttttttgagacagagtctcactttgtctccaggccggagtgcagtggcgtgatcttggctcactgcaacctctgcctcccaggttcaggtgattctcctgcctcagcctcctgagtagctgggaccacaggcatgtgccaccacgtccggctaatctttttatttttagtagagacggggtttcaccatgttggccaggatggtctcaatttcatgacctcgtgatccgcctgcctccgcctcccaaagtactgggattacaagcgtgagccaccgcgcctggcctaattttttgtattttttagtagagagggggtttcaccatgttggccaggctggtctcgaactcctggcctcaggtgatccacctgccttggccccccaaagtgctaggattacaggcatgagcccctgcacccggcctgctattttgcatatttgtttaacttttttttttttttttttttttttgtggagacaagatcttgctatgttacccaggctggtctcgaactcctggcctcaaagtgatcttcctgccttggcctctcaaagcgctgggattacagacatgaaccactgtgcctggcctctgttttatatattgtatctaggaagggaccgatttatataaggtgtcatttgaggttgggcaatgagcaaaggccccaagggcaaaggctgcttgatattttcatggactggtgattggaacactagtgcataggaggaagcaagacagtggcagttttaggctcatgcatagaagcttataccaatgtttttagaccatatttggtaggagatagggagccagtgcagatttttggggagcatatccaaatggttgacctcatcttgctaatgaatgcttcttttgaagaagaggcatagtgctttaaaaatgtaggttcaggctgggctcttcctttgctcatgcctataatcccagcaatttgggaggccgtggcaggcagatcacttgagctcaggagttcaagaccagcctggacaacacggcgaaaacctgtctctacaaaaaatacaaaaaaatagctgggcatggtggcgtgcacttgtgatcccagctactcaggatcgcttgagcccaggaggtggaggttgcagtgagctgagatcatgccactgcactccagcctgggtaacagagtgagaccccatctcaaaaataaaaataaaaaatagccaggcgtggtggctcacgcctgtaatcctagcactttaggaggccgaggcgggcggatcacgaggtcaggagctcgagaccatcctggctaacacggtgaaactctgtctctactaaaaatacaaaaaattagccaggtgtggtggcgggcacctgtagtcccagctacttgggaggcttaggcaggagaatggcatgaacccaggaggaggagcttgcagtgagccaagattgtgccactgcactccagcctgggcaacagagtgagactctgtctcaaaaataaaaaattaaaaaaaaaatgtaggttcaatattagaggaaactgagtgaccattatacaggaactgtgtactatttttacagcttttctgcaagtccacagttatttcaaaataaaaattttttttaaatgtaggttcaataaagtgtttaaggctgaactatgcctgcaactttcaaatagttgaaaaacaataatgacaaaacccatataagtatggagagagagtgtgttaacatcttatgaactgtaaaattgctaaataggtgaattgttagtatggaagtgttccatgtatcattctttcaacttttctgaagatttaaaaacagcttcaaaataagcaatcaagcgacagtatacgtttgaatcaggcaggcttgttcaagtcatgattcccctacttacaagctgtgtgtggctgggcgcggtggctcacgcctgtaatcccagcactttgggaggccgaggcaggcggatcacaaggtctggagatgagaccatcctggccaacatggtgaaaccctgtctctactaaaaatacaaaaattagccgggcatggtggcaggcgcctgtagtcccagctactcaggtggctgaggcaggagaatcgcttgaacctgggagatggaggttgcagtgagccgagatcacaccactgcatttcagcctgggcaacagagcaagactctgtctcaaaaaaaaaaaaaaaaaaaaaaagctgtgtgaagtattggaaaattatttctaaactacatattctagtctagtttatttttattaaaaatatatttttaattatttttttttcttacactgtagctcttaccagtctagtctgagatttttccatataagagaggagacttactttggttgttgacttgttcacattaatgctgggttaatgttaagacttcaggttttccacaaacttgagatctttaggttgtttttaggtcgactctagttttcctgtaattatctgatgtatatacacttacagagactggcataggcaatctattagaggaaaaaggttaggagtcaggatacttgggttctggatccatctctgcctttaagtagcaaatgatttcactaatctgaacctttatttatttattttattttattttttgagacagagtcttgtctgtcacctaggctagagtgcagtggcgcaatctcaactcactgcaacctctgtctcctgggttcaagtgattcttgtgcctcagcctcccaagtagcagggattataggcatgtgctaccacgcctggctaatttttggatttttagtagagatagaatttcaccatgtgggccaggctggtcttggactcctgagctcaagtgatccgcatgcctcggccttccgaagtgctgagattatagttgtaaaccactggtacccagctgaactcttatttcttaccaaaaaatcatggcggttggatttcttgatctctgtctagctctaaagtcctgtaattcaggaaaactaccacttaatgatttgatcatttagtttgaactgtctcatggttgggacagagggttatgacttgcctggagtccagggctcctgacaacaggttactttttctactgaccctcactgcctatggttttagattgtgttatgtgttaaaagcagttacttaaacacacatacacaaacatgcatatcacaccatatttacaacaggttgtgaagctcagttttaaatggcctagatttcttaggaaaatcccagtacaggttgagtatcccttacctgaaatgcttgggactggcagtgtttccaatttctgaatttttttttttaatatttgttttatacttactagttgagcatctctaatctggaaatccaaattgctccagtgagcatttcttttgagcatcatgttggtgctcaaaagtttcagattttggtgcatttttgattttggatttttgaattagggatactcaacctgtatctgattaatatgtcatcaaatctatccaatgaagctgtcatattttaaaactaaatataactgtttttagaaaaatattacaaaaagaaataaaaccttgcttagatacttcctcccaaagttgtgtgtgtctggggacttaagaaatacatttcccaaggctgcgtatccagagtattggaacattcagtgacgatttcttaggaattgaaatataaactgcaattgaaaacaaaatgacttagctgggcacagcggcgtgtgtccataataccagctaatctggaagctgaagtgggggattgtttgaggccaggagttcaaggctgcagtgaactatgatcatgccactgcactccagtctgagcaacagagtgagactgtgtctcttaaagaaaagaaaaagaaaattatgtaacaggttatattcaagctactcttttccccttcagataagaattagactttatagctttattgtagtataattgacatacaataagctgtacatatttcaaaggtactctctctatatatatacataaaactgtcaccacaatcaagatagtgaacatatccatcaatccccaaaatctcctcatgcccctttgtaatctctctctcctaccccaccttacttcctatcccgaaatagccactgatttactttctgtcactataaattagtataaactttttttctttctttcttttggtggaggtgtcaggaaatgaacttgaggactgattagtttgcattttgtaaagtttttgtccctgaaatctccttcatctaatattaatgtagtgtacaatgcagtggcatgaagtacgtgcacaatggtgtgtaaccattactactatttatttccaaaacttgaaatggaaactctgtaaccagtaacaccacttcccccagtacccagtaaactctattttctttctctatgtatatgcctattctctctctctctgtgtatatatatatttttgttgttgttgttgttattctgtcacctgggctagagtgcagtggcatgatcatagctcacttcaaccttgacctccttggctcaagcaatcctccctcctcagcctcccaaagtgctgggattataagcatgagccaccctgcctggcccattttgccttttctagatattttgtataggtagaatcatacaatacttgtccttttgtgtcctttttttttttttagatccagctctttttttttattttttatttgtttgcatcgtgtctgtcttttgcttaacataagggtgttaagtttcctccatgttgtagatgaagagtatcagaacttaattcctttttaatagtcaaataatattccattttatggttataccatgctttatctgttcatctgttgatggacacttggattgttttcaccttctggctattgtaaatagtgctgttatgaacattagtatacaaatatctgttcgagttacagtttttagtcctttgagtataagcggaattactaggtcatatagcagtgctgtgtttaactttttgaggaaccaccaaactgtttttcacagtgttggcaccattttacatttctaccagcaatgtatcaaatgtatcagctgtttttttttaattttatttatgttattttttagacagagtctcgctctgtcactcaggctggagtgcagtggcgcaatcttggctcactgcaagctccgcctcctgggttcacgccattctcttgcctcagctgcctgagtagctaggactacaggcgcccgccaccatgcctggctaattttttttttttttttgtatttttagtagagatggggtttcaccatgttagccaggatggtcttgatctcctgaccttgtgatccgcctgcctcggcctcccaaagtgctgggattacaggcgtgagctaccgtgcccggcctcaactgtcttttttttgagacggactctcggtctgttgccgcagctggggtgcagtggcgcgatcttggttcactgcaacctccacctcctgggttcaagtgattctttgtgcctcagcttgctgagtagctgtgcctcagcttgctgagttacagctgtgcaggtgtacaccaccacacccagctaatttttgtatttttggtagagacagggttttgccatgttgcccaggctggtctcgaactcctgacctcaagcgattcacccgccttggcctcccaaagtgctgggattacacgtgtgagccactgtgcccggcctcaaatgtcttttaaagaaacaaaaatttttgtccaacaaaagtcaaagctaattcttcttggaaaagtttttgttaaaataactttttaaaataaaaaccattctgtccatcaaaaactttattagatacttcctgtatgtgcctaattctatgctaggtattatgatagtacacaaaaagtgtagaacatcttgaataattttaatctagttaggaagataaagcacatattcaacaaacgtttattgaacatataaatggaattcagcagagaatgaggtactgtagacctttcactctgccccatttatttttccaattttggcttctctcctgtacttgagaaccacatttctaattgcctgctggacacaccatctggacatattataaaaatctcaaatctaaaaaacccaaagtcagattttttgctgcttcctatctttccattttcttctccatcttcctgtatatcatccttccttttgtgtgatccttctcagatttcatcttagatttgtctgtgtatgtcctttaagcaccacctcttacctagttgtaccactgaaatggcaaacctcctgccctttcctgccttggaagttaggcctttggtaactgtagcttagaggatgaactcgtgacttcttggaattgcataaaaactaatccttcactccagccttatctcctacaacttcacccttggaacctagtgtgaccttttcctgggtcttggactatactgtgatctttcacttgcctgagttaccttttccctttctattaacgttgcagcttcctacttcacgttggcctgcagtgtattctccactctcagaatactctaaacctttctgttatggtacctagaatgctgtttaaaactctgtcttaatccactgattttgggtagaaattgggttattactcattttagcaagaatttactgaacctctactgtatgtgctaagcatcgttcttgataatggaaatataataagtacaagaaagactgtaaataatagttttgcttataagtaatataatttcagaagtctgaagtgctatgaagaaaataaagccagataaggatatagggaatgctgggaaggaggtgttattttatttggttgggatggtcaaggaaggtttctgtgaggaggtgacatataaactgaggccaggcatggtggctcacacctgtaatcccagcactttgggaggcagaagtggaagaattgattgagcccaggagttcgagaccagcctgggaaacatagcaagaccctgtctctacaaagaaataaaaacaaattagccaggtatcgtggtgtgtacctgtagtcctagctacttgggaggctgaggtgggaggattgcttgggcctaggagttcaaggctgtagtgagctatgaccatgccactgcactctaacctgagtgacagagtgagatcctgtcactaaaaaagaaaaataaaagctgagacccaaaggatgagaacatacctgtatagatctgggagattattattctaggcaaagacaacttgagcaagtacagtgaccctaagaatggaatcaacttggcatgttccagcaactgcaaaaaagccagtaggaaataagggcaaaaagggaggcagtgttcagatcttgcaggctattagagtattccaggtgagagaggatggtaggacaatagtgagaagggattggattacaaatagtttgggcagtggggagaggataaatatattattcaaggcacaacagacaggatttactgatggattatatatgggagcatggcataggggaaagaaagattgacacctaagtttggggtctaggttctgatgcattgtgtctagcacagtggttagcttatagtaggagcttaaaatatgtgtgtaatttaatgaagaccagtacccaacctctaggagctcacatagaaaagttagccaatccagctggagaaggcttgttgacacttgaggacattaatggagtaagcatgggttgcaggcccatttaacacagatggatctgagttttcctctgatgagttgttgtcttttcctccaaaggatccttttcctctcacagtattaacttctcagtctagggcaagggcctggaaagtagcctgtgccatcctggttgtaggcatcagtgaatgaaatggagaggaatacagaaggctttgctcatccttggcatccctgggcctttatagtgctgtgatcttccctggacttgtctgacaacagtgagttagaggatccgatggtactatatacatggagaatctgtcttggttgtacctgtttatagtttagttttctttttcttttttcttttctttttctgagggtctcattctgtcacccaggctggagtgcagtggtgtgatctcagctcacttcagcctccacctcccaggttcaagcgattctcctgcctcagcctcctgagtagctgggattacaggcgtgcgccaccacgcctggctgacttttctatttttagtagaaatgggttttcatcatgttgcccaggctgatctcgaactcctggcctcaagtaagccacccgcctcagcctcccaaagtgccgggattacaggtgtgagccactgtgcctggcctagttttgtttttctaaaaccaccttcaactattttttatctgtaaaagacaaaaggtaaaatattagttgctttagtggaaaaagaatgaaataatataacatcagaccagaagatatatgattatttgccaaatgagtgatatagtaagtgactttctcaaaatctttcagggcctatgcattgcctgcagattcaagtctagctttcttaacccggcataaagggccctccagaatccccctcaggtacctttgtaagctcctcccactaatcccccataaccattctctgttttaaacataacattctcatttctgattcttttcctccaacattagaactattgctgtttgtgttttcttctcccttacccatattccaagtcttctttcatcctttcaaacctgaactagacttcagagcccaggttagatatgttcctcccttgaaaactttctaaacaaactattcttaaactctttcatatttctcccctgcttagatgccataatcatagtagtcagcagcttctagttttatttagcagtgagtttgtagcatacatacagaggtaaaccaaagcatgattatggaactttgtgggttcatacttgtaggactgtttctgagtgaatacataagtttctaagagctagagatgggaaaggaccatggccatgaatgtagagaaagggagagttgggaacaacattgttgatattattactggatcactttgtgtagcagctaggtgaaactggaatgtgtagagtagctgaattttaaggtgttcagaaatatctgaaattagagaagctaattatagataggtggtaggagtagtaccatattaaaaaaggatctattcttgggatcccaaaatatgcattttattaccttgctctgtcatttataagctgaataaattactaaattgggccagtcctttcacttttaacctatgtatgtctttatatttaaagtgggtttcaagtagacagcatatacttgggtcttattttttaatcctatctgacagtctccatttttaattagcatgtttagaccattcatatttaatacgatatgtttggattaaactctaccatcttactggctgtcttcgtttgttccatctgttttttatgttttatcttccttttctactttctcttgagttgagagtttttttatgattctattttatctctactattattacttatacctttttaaaaatgtagtggttactcttaggtttaaatgtacatgtttaatcagagcctatgttcaaataagataccatttcacatctagtataagaccttacagtttgctgggcatggtggctcatgcctgtagtcccagcactttgggagaccaaagtaggaggatcacttgagcccaggagtttgagaccagcctgggcaacatagtgagacctcatctctatttaaaaaaaataataataatcagaaaattttaaaaagactttaaaattcccaattccccctcccattctgtgtggttgttgtcacacatttattttgcatatgctataaagtacattcccatttttggtttaaacagttatcttttagagcaattaaacattttttaattgaaaaaatgaattttactttatcttcatttgttccatttcctggactttctttgttatgtagaactgaatttctgattggtgtattctttttggctaaagaaccttcctgaaactgtctctctctctctgtgtgtctctctctgtgtttctctctctttccccatctcttcttctccttcccactccctctctgtctctctccctgtctcccctcatctctctctcccgttccccccacatatatatggtgctggtctgctggccttaaatcctctcagtgtttatctgagaaagtttttatttctttttcatattttattttatttaagacagagtctctccctgtcacccaggctaaagtgcagtggtgtgatcatggcttattgcagcctcaacctcttaggctcaagcagtctccctacctcagcctcccaagtagctgggaccataggcacacaccaccatgcctggcctcttatcttttaaaatattttttctaggtaaagaattctatgttaaaagttatatttctggggtcagatgtggtggctcacacctgtaatcctagcactttgggaggccagggtgggaggatcacttgaggccaagagtttgggaaccagcctggggagcttagtagcaagaccttgtctctacaaaaaaaattaaaaaatgagccaggcttggtcgtgcacacctgtaatcctcactactcaggaggctgaggtgggagaatcacttgagcccaggagttcgaggccatggtgagccataattgcatgtcactgcacttcagcctgggcaacagggcaagaccctatttctataaaagatatatatttctttgatacaaagataccactccatcatgttctggcctccatgatttccaataagaagtctgctataattcttatttttgtttctgtataagtaatatatgttttttctttgtcttcaggattttctctttatcttttgttttcagcagcttgaatatcatatgtgtaggtgagggtttttgttttctttttgtttttatatttactcttcttggaattctctaagattcttggagatagattatatattatatatatatgtattttttttttgagacagagttttgctttgtcaccatgctggagtgcagtggcgcgatcttggctcactgcagcctccgcctcccaggttcaagcaattctcctgcctcagcctcctgagtagctgggactacaggagcgcaccaccatgcccagctaatttttgtatttttttagaagagacggggtttcaccatgttggccaggatggtcttgatctcttgaccttgtgatctgcctgccttggcctccggaagtgttggaattacaggtgtgagccactgcacccggccttttttttttttttttttttgagaaggagttttcctcttgctgtccagacaggagtgcaatggcgtgatctcggctcactgcaacctccagttcctgggttccagcgattctcctgcctcggcctcgcgagtagctgggattacaggcgtgtgccaccatgcctgactaattttatatttttagtagagaccctgtttcaccatgttggtcatgctggtcttgaactcctggcctcaggttacttggatctatattttgatgtctcttattaattttggaaatttcttggccattatatcttgaaatatttcttctgcccattctctctcttcttttggtattctaattatgcatatgtttgatactttgatgtgtcccgcagctcttggatgttatgttacattgttgatattgggggttttttgttttgtttcgttatttaaacttttctgcgttttagtttagctaatttctgtttatctgtctttttgagttcatcgattctttctttggctttcaggtctagtaatgatcctatcgaaggcattcatcatctctgttactgtgtttttcacttttagcattccttatttgattttttcttacagtttccatttctttgttttactttctatgtgaatttttatctatattcttcccagatagcagccatactgggcaagatttggattcccttagttttttcttatgtctcttttgcatatcttaggtttggaaaaaccttttcacccagaaatcaccaagagctctccaaaataggacgttggtgcactcaagctagctctagaaagcaggaaatgacaggagagtcacagactggttgcattgtagagcaaagagctgctgggtgtatccatcaacctgattgattttctcagggtcagtggtcacctaagtctattctttctttccttatctacttcagaagaccatcaaaatatttactcatgttaaacctaaacaaaatgaatatgggttacttttacatatcttgtgttcttgaataagtcataggtcctggattttggcagtttggtaacgtaaggtttatagaacttcacaagggcccatttttctgtcagttccaaaacaagaaacttcctgagtccttcatctaaaatatattgtctcggctgggtgcagtggctcgtgcctgttatcccagcactttgggaggctgaggcggatggatcacctgaggttaggacttcgagaccagcctgaccaatatggtgaaaccctgtctctactaaaaatgcaaaaattagccaggcgtggtggcatgcacctgtaatcccagctactcaggaggctgagataagagaattgcttgaacccaggaggtggaggttgtagtgagctgagattgcaccactgcactccagcctgggcgacagagtgaaactctgtctcaaaaaaaaaaaaaaaaatgtctctatctggccacagtcacaaatgtttgttcatttgttcattcattcattcaaatgttttgtaagcctgctatctcagcgttactacattccattcagattacactgatgaacaagatgtctttcctccaggagctagagagattcctacttcactaatacaagagtgtggttagtactctaatggaggtgcaacatgctatgggacacagagggtgtagtatttcatttgggctaggggagattggttagtgctttctggaaaaggtagcattgtaactgggttttaaaaaattattaggatcttgacaggcaaagaggtggatggccattctaagctaagtaaacagcttatgtaaaggcactaattcatgaagcatttggtaaacaatttatgttctattcctttgagagcctggttcattttcttctcttactccggttattagacttactatttgttgttgtcctttctctttttctggctatttttacctcctttgttttcctatagttcctcatggtagatcttatggcattagttttatagtctaggacacagagatgaaggatcacctgtattgcctccaagtggaagtgcagggcaacattatttctctatttaacctgtgtttcagtgtgtgtacttagaatagtaaagtgaatcttgcatgaatgtaggccctgcccacagggcagatgactccatactagaacatagtggaatagacaaaaaccttctacagcatgtatgagacacttggcccatcgaccctcttcatgccctttacattcagcaccctcatattgacttctctctcctctttcctaccaagcaagggagtactgttcaaagacgcaaatgcattctgccctagtttctttttattgctaaaaacatttatctttaccctacaacctacttttctatttattttcaacatttagcaggttgtttaaaaagggaccaaaaaataaaacaggaccatcttccttgtttcagggactggtaggcaggcattaaggttaaggtaggggttaagaccagatcctattttgcagtctgcctgggaggtgaaaaacctgggaagaagaccgctggtagcatatgtatggaaaggagacaggctgcccttacatcttttcaggaggaaaaactgccagggggagccaggcatatatggagaagaatccttaatggtttatactcttgggaagtcctgtacccagccagttatttgctttgacttggctgtttaaggtctggttctggtctttttttttccccctaaccaagacaaatgaggctcaattaaggaaaagggacataagatacctattccaaaactgaattccttttaactctcatgaaatgacaaatagaattgttagtatatgtgagcactgagaattactttattgatgaacactggtattttctctggtgtaggaagctgaaccatctatctccagaaatgtcttcagaaagtaaagagcaacataacgtttcacccagagactcagctgaaggaaatgacagttatccatctgggatccatctggaacttcaaagggaatcaagtactgacttcaagcaatttgagaccaatgatcaatgcagaccttatcataggatccttattgagcgtcaagagaaatcagatacaaacttcaaggagtttgttattaaaaagctgcagaagaattgccagtgcagtccagccaaagccaaaaatatgattttaggtttccttcctgttttgcagtggctcccaaaatacgacctaaagaaaaacattttaggggatgtgatgtcaggcttgattgtgggcatattattggtgccccagtccattgcttattccctgctggctggccaagaacctgtctatggtctgtacacatctttttttgccagcatcatttattttctcttgggtacctcccgtcacatctctgtgggcatttttggagtactgtgccttatgattggtgagacagttgaccgagaactacagaaagctggctatgacaatgcccatagtgctccttccttaggaatggtttcaaatgggagcacattattaaatcatacatcagacaggatatgtgacaaaagttgctatgcaattatggttggcagcactgtaacctttatagctggagtttatcaggtaagcagcaatgaaacaattggttatttctagaaaagtaatctagtacatgaaatctcatatctctaagggatctgaggaatcacaataattaaaggtatcatttattgagagttcaggatatatgaagggtagaggcaaaattcaaaccctaacctgactccacaggtaatataaggctggttcactggacctccaccacccagtacaactccttaattttacatgtcagaaaatcttggctttgcttgagattatttgtggctggttattggcagagtcagcattagcagttaggcaagtgggtaacagaatggagttgagagtgcaggagtttctcactttttttttttttctggagacagggtctcactctgtcacgctggagtgcagtggcactatcttagttcactgcaacgtccgcctccctggctcaagcagtcctcctacctcaacctcctgagtagctaggactacaggcacatgctaccacacctggctaattttattttattttattttattttattttttatttttattttttgtagagacagggttttgccacgttgcccaggctggtttcaaactcctgagctcaagcaatcctcccgtcttggcctcccaaagtgctgggattatagccatgagccaccacacccagcctcaaattctaaatgtctcttaccttccattaaaattgctgatctattgagcaactcttactaaaggtagtggttgtcttggattgttggggagggagggaaaaagttggggaccacagtttcatattatcagccaggagaaaggataagaaatcaaattcttgagtctcccatagaatccactaatctgtcattatcatcatgcccctggcttttggcatccaggagtcagtgccaggattaaaccttctctaatgcaggcatttcaaaccaacaagggaaggggaagagtagctcactttagttggtgctcagatgagtggggagggagagtgaagatggtgtgaagatgagctgtctactcatatataatggtaaataataagtctacttacttatttattatttattcatttatttataaagagacagggtctctctatgaccaaactcctgggctcaagtgatcctcccaatattgcctccccaaatgctgggattacaggcatgagccatcacgcccaaccaacttttgcctttttgttagtatgtcccaccaagaaggaagaaggcataacaattctgaaaacttattagacagaggaaaatataaagaagtaaaaatgcagaatttttattaatatgggagacagtgtggcataagtacatatatactgcatgagaatggtttcttagtatgaggttaaagataatctacaataatttttaaagtgtgattctactttgatgtaaatctaattttttgttttaccaattaaaacttcacttgtacacttgctcttagccaagaggctgagaagccgtaagacttcacttttacagtagtgatttgtaatttaaggaaaatacttggtttcttaactagaataattttttccaatttgaagttttcttgtggatccttgagaatgtttttcttttaaaagaggtctgttctttgtgatgggaagaatgaaaaaaaaaagaggtatgaaccttattcaagtttaagaaacgtatgaaaagaaagaaatccaaagttcctgtctcacctgggttaataagtaacagtgtgaccttgggcaagttgcttagccctttaaacataattttcatctttgtaaaatgagaagattgatatatgattgtgtttattctagctctgacattctgtgatgctctgatgatatgtctccatgcaagaaatgtcaggataatataaaatttagaagttcttttccatttatatttaacacttctatatccttccttccaggtagcgatgggcttctttcaagtgggttttgtttctgtctacctctcagatgccttgctgagtggatttgtcactggtgcctccttcactattcttacatctcaggccaagtatcttcttgggctcaaccttcctcggactaatggtgtgggctcactcatcactacctggatacatgtcttcagaaacatccataagaccaatctctgtgatcttatcaccagccttttgtgccttttggttcttttgccaaccaaagaactcaatgaacacttcaaatccaagcttaaggcaccgattcctattgaacttgttgttgttgtagcagccacattagcctctcattttggaaaactacatgaaaattataattctagtattgctggacatattcccactgggtttatgccacccaaagtaccagaatggaacctaattcctagtgtggctgtagatgcaatagctatttccatcattggttttgctatcactgtatcactttctgagatgtttgccaagaaacatggttacacagtcaaagcaaaccaggaaatgtatgccattggcttttgtaatatcatcccttccttcttccactgttttactactagtgcagctcttgcaaagacattggttaaagaatcaacaggctgccatactcagctttctggtgtggtaacagccctggttcttttgttggtcctcctagtaatagctcctttgttctattcccttcaaaaaagtgtccttggtgtgatcacaattgtaaatctacggggagcccttcgtaaatttagggatcttcccaaaatgtggagtattagtagaatggatacagttatctggtttgttactatgctgtcctctgcactgctaagtactgaaataggcctacttgttggggtttgtttttctatattttgtgtcatcctccgcactcagaagccaaagagttcactgcttggcttggtggaagagtctgaggtctttgaatctgtgtctgcttacaagaaccttcagattaagccaggcatcaagattttccgctttgtagcccctctctactacataaacaaagaatgctttaaatctgctttatacaaacaaactgtcaacccaatcttaataaaggtggcttggaagaaggcagcaaagagaaagatcaaagaaaaagtagtgactcttggtggaatccaggatgaaatgtcagtgcaactttcccatgatcccttggagctgcatactatagtgattgactgcagtgcaattcaatttttagatacagcagggatccacacactgaaagaagttcgcagagattatgaagccattggaatccaggttctgctggctcagtgcaatcccactgtgagggattccctaaccaacggagaatattgcaaaaaggaagaagaaaaccttctcttctatagtgtgtatgaagcgatggcttttgcagaagtatctaaaaatcagaaaggagtatgtgttcccaatggtctgagtcttagtagtgattaattgagaaggtagatagaagaatgtctagccaataggttaaaatttcaagtgtccaacatttcccagttccacagtgggaaattttgcacacttgaaattttaaccaagtggctagatattattcctcctttgaagctaatggcatttgtatatacacactgcagcagagcttgtagctggacagagtcaaaaagaagaaaatacggtttcaggctttcttgcagatatgaagtattcttggaatgcaataagtatgtattgaactgtactgtaaagtagctccaaaacttaattactctcctgttttaggggttatacatttggactgtgcattctccaagagatgaagcggtgaagttgggatttacattggaagtgctgtagacttctttatgtggctcagtggagagagggaaagaatgttgcacctgctctagtaccataggtcaagaggcttctggatcacaaagtcataactagacaggtttgttcttgtagttttctatccccagtctttgctccccagatggcagtagtttttagtaggaaagtgccattcctgtccttaaggcacagtctcatcagaagtctaatacctgggcaggtttataacatcctgagagccagcctgacattagacagaataccctttgtaatacattggaaatttttactcatgcctttttgtttaggataaataggtaagcacaaagagctcttcaaaatcagaaaaaacaataggagtccttccttgtcttttctgtgatctctgtccttgtttctgagactttctctaccattaagctctattttagctttcagttattctagtttgtttcccatggaatctgtcctaaactggtgtttttgtcagtgacagtcttgccagtcagcaatttctaacagcattttaaatgagtttgatgtacagtaaatattgatgacaatgacagcttttaactcttcaagtcacctaaagctattatgcaggaggatttagaagtcacattcataaaacccaagtgctatgggtgtattattcatgatagctggcccacaggtcatgaattgaggaggaatttgctttcaaaaagcaagaatgtccaacactgaaagtttatagttttatatttggaccttgaaaggtaagaaaaaaccaggttctccaaagttaggaatagggaactaatttatgaaacagccatcttaaaaaaaaaaaaagtaaactgcaaaagtacaaaatcatttttcaatctgttcccagtttctaaacaattttaaatatttatgagaagcaaaccctatgtgtagggcatctgttggagtgggatgcttttagacatatattaagtatgtacatgtttaatatgtatatttaaaatgcatatatattttattatatctatattatcctatatagatatatgtaacttagctttattgttagctccataagctgccagtgttgcttttctgttggtagagctctcccatttggtgacatggaaaatacctttccattatcacaacaaagcagttgctcagtagaaagtctagatttctgtcttataggtgatttctgtcttataggtgattataatcaagtgtaggcttcctgaattttgacatccttttagaacttgggtctggaattccagaaatgttaattgctgcttgtatttgttcttgtttgttttttagccagtatttgccctttctatccagccttatgaataatagcagtaaaatcacagtatcttggtcagtctttatttttttccttttttcttttttaagagacagtcatccaggccagagtgcagtttgatgatagcttactgaagcttcccactcctgggctcaagttatccttccattttggcctcctgagtagctagaccataggtatgcatcaccacaccctgctaattttttaaatttttttctagagagagggtctcactgtgttgcccaggctggtctcaaactccaggctcaagcaatccttcagcctcagcctcccagagtgttgggattacaggcgtgagccactgcacttggccaagttatttatttttaatctctcttgcccttctcccaaggcaggcttaagttgagactattataggtgtctaataacctgtgacagagtaatgagtacatgcttaagatgttataattagccaacaccaacacagcaaaaaatataattccagccaaagattctggaaaatccctcagaaggagggataacaggatttgacctttaccagcgatttctgtccatatgtggatgtaaacagttctggaacgttatgcatgcagttagcgaatccttgaattatgttctggtttgtacttgtcccatccatccaaacaagagattctgcttttggtagccatctgtagaaacatttaagatgtcactagaatttacatttcatcctctctacttgggttgaggttgcctatacttgcatattgttaaaatgttttggttgctgatattcagaggaatgaaacctggaaccaaagcctaatttgccgataaaaaaactgttttcggccaggtgcagtggctcatgcctgtaatcccagcacgttgggaggccgaggcgggtggatcacctgaagtcaggagttcgagaccatcctggctaacactgtgaaaccccgtctctactaaaaatacaaaaaattagcggggcatggtggcacgcgcctgtagtcccagctactcaggaggctgaggcaggagaattacttgaacccgggaggcggaggttgcagtaagcagagattgtgccactggactccagcctgggtgacagagcgagactccgtctcaaacaaacaaacaaaaaactgttttcatttgctctcttgaccaaaggataggactttagttctttaagcattattttaaacactatattgatacaaaaatatcttgcttactctaaactttagagtctaaatgaagctttttctcagtacaagattctgagtatcataaaatggttatttaattgaaacgtagtgtggtatactcttgatggttagaactcttacagccttatttatttttaagtttgttacagccaaagggttggagtgtgccagtgcacaggtagactaaggaaaacattatagaggagtgaagagaacagaccattgaaaagactattatctgaccagcggaggcagaaaagagaggaacccagttgaataggatccaatccctggttagcctctacacaataatagggagacaaggattaggagccatacctcccagagcaaggtatctttctagagcaaatttctctttctagaaggggagggtcacagggtcacagattcaccaaagctgaaagggctgaggagctcatggtagcctgggctgacctactctggagcacggtgtcttccttctaaactgagtgactgtagtactatctgtgcctctgatggtaataaaactgacaagatgtctaatttttttttaagtaggaccaaaggaaaacaagatttagatagtctgactttgcttttgaacaacagacattgcaagtcaaaattgttgtcaaatttacatatggtaaatgatgaactttaaaaatgtgtccaggtgttagatgagttcattagactcttttaatgctaatggctagtacgtttaaacaaaacagcagttctctgctgcaatattcccattgaccacttaaatgaccataagtggtcatttaagaacatgttagggttagccctgatctgaatataaaagtgagaaaagggctacagtgcatttcttggtaacttaaactgagtcttgaagttataatgatccattcgagttctgtgatccttattgttcttaattgtgtttctctacgtattgttacagatgagccatacgtttctttgtatcaatgtagacatgacttcagatacctctgaggacctacccagcagtctaggaccctgggccaagtgctgggactatggtactaaatccagtagatgggctgtgtagcaactctcccagggaacacactagggtacttagggaggtgctttgtggagcatgttgaagctttgagatctgagcaggaggcagtgatgtccctggtctattcagggaaagatttcagtgtgaaatggtaaacatccaattgacaggatttagattttgcttagtttttctgctttttaatgtttctatcccccatctcagtgttttctttatccatcccagtgatgccttatttgaaactgggcttaaactgcaaaaagaatgaagttggatttaggaagctgttagatcattgagtggtgttgagagtgaagtttcactagcagggaagtttccttgagcctaaaataaaaagaaaaaattaaaaagaatcagtttttttaattaaaaaaatagaaagctgttaggctcctaattcgtggggtttttttttgtaaaaacagtttagataatcctgaatgcaatcattaacttggttgctaattacaagaatgaaaattataatggaaaaggacaaaataatataccagctggtttgttattatagtccgtgtattaaaatactattgaaatacgttaaaggtaaatttttaaggtttaaaaaaaatttagtaacttacagggatggagaatttagatgtcagaggtggggagatttatttttataaggtaatttttatcctgataaggacttaaaaaaaagttttgcaactgaaattttaaagtaaacatgttaagtacagttaaaaagtaagcattgtagtaaatagtggattctctggtgtgtattttttatctcagtgttgaaaattggaaaagaatggactgaagtctaaaaactggaataatgaaggacactaaatgcctttattgtagatactatgtttgtaagtctatagctaagcaacttaagccaaaaaggtctttcaactgaagctttaatcaacttattttggagatgttctcttcccttatctcatgcgtcatccctaaaataataagatacatgggatcaaatagcccttgccttttcaacacaaatcagttggaaaattatggtttgagtcctgttgctgccatggcttctgtttctcagaaatgagtgtgtatgaacataccaatctatgtaataggctacctttttttgtcttctttggaactttgtacacaaaccaagacaatatcagggtgacaggtgaatgaacttaaattctcagtcttgtctattcaccaaaaaagtatactgcctgttttttctttaattattcaaggttgatgacttttaggaacatgttttatactgtattttttaattaaagcaagtgccttgatgtaattccatgtaaatcattgcttaaccctcttatgggatgaggatgagttattaatgtattgcagcctactggaaaggagggggagttggttaatagcagatacttttcttctagaagcttatgttttatgctgtttattatgtaagatcctgtatgtgtgttgagatttagaggtttcatttgttttgtctgctaataaattgttactctaataatacattactctgtatttaaattatttaagtgcaaggagggttctgactaaaacacatttaggccccagtgagttttaaaataccatctgttggccaggctcagtggcccacacctataatcccagcattttgggaggctcaggcgggtggatcacctgaagtcaggagttcaagaccagcctggccaacgtggtgaaaccccgtctctactaaaaatgcaaaaattagctgggtttggtggtgcacacctgtagtcccagctactcaggaggctggggcatgagaattgcttgaacatgggaggcagaggttgcagtgagccgagatcacaccactgcactccaggctgggtgacagagcgagactctgtctcaaaaaaatacataaataaaataaaatatcatgtgttaggctgggcacggtggctcacgcctgtaatcccagcactttgggaggctgaggcaggtggatcacgaggtcaggagttcaagaccagcctggccaagatggtgaaaccccgtctctactaaaaatacaaaaattagccgggcgtggtggcaggcacctgtaatcccagctactcgggaggcttgcggcagagcattgcttgaacccaggaggcaggggttgcagtgagccaagatcaggccattgcactccagcctggacgacagagcgaaactccatctaaagaaaaaaaaaatcatctgttacatttggagagtaattcagtcattaatgtttcccagtcataacaaaaggatctgtcctcggagaaggacataaagaaatccaattctttttcctttatggtcttgaatgagtcacttaaacctttggtgaagaggggaggaggactagattgcttgaggaccctttctgttttttgtttgtttgttttgagacagggtcttgccctgtcgctgaggctagaagtgcagtggcgcaatcatggctcactgcagtcttgacctgggcttaagcaatcctcctgcttcagcctcctgagcagctggggttataggtgtgtgccactacactccggctagtcttttctattttttgtagagacggggttttaccatgttgcccaggttgatcttgaactcctgggctcaagcattcctcccgccttggccttccaaaatgctgggattataggcgtgcgtgactcctattccatacagtactgggatcagaaagcccaattttggatcatgttttactactatcttaactctgaatttgggcaagtgacctttgagccacattttttttccatcagtaaatagaggctaacaccttctgatgactgagagaactaggagtagattcctgattggagcacaccattttgtaaggaaatagagcactactctcaccctatacatgccatgaagcctctcccagaatgtcctcctctttatgcctcgctcagttcatgagggtacagggttaaggacagtttttagtcctccttttgcagtaaccctgagcattctcccaacctcattcccacctcacagagtgaaggagttgaatagtctaagggtccttccagtcttaccgtagtgtgcactcctgcctgtgagcagcacctaggatccagagccctgtgaggtacactcagtcattctggagcatctctgtcagccatcttggagggcctcacttccccatctgtcctttcagggcttgtgtccttggcctcttctctcttcacttaataccactgcttaagtattttgttttcagatccagttgaggctgatgaaagtatgactcagggaaatagccacatgtgcaggtatacacgtatagctctaaaaaggttggctcatggactcccatatgttgaacaccttgcattataagcccactctacataacttcatccacatgtatgtcctcaatcaccgtgctatctgtggcagccaaaaaatatttctagcctaaccattctagaacgccaaacagtctatctgtctgtatataaatctccagggctggttgttaacagacaactgcctggatgcccagagacatctcacatgtaacatgaccctcaaacttgtcttcctttctcctggtaacatactttgatcctggcacgacccagccacttaagcagaaacctgaaatttcatgaaatctccctttacaactcccacactaaatccatcttaccttgtaaatgcctctcaaatccaacatgtttttcctacccctcagtgttaattatttctcttcagtactataccacagcctaactagtttatctgcttttctacaatccaacctccatactagttatcaattattttaattaaaaagaagttgaccattgctacttagggcaagtagaaggggtctctagtgcctttaggataagttcaaaataaatggtctaacccacaagacttaaaaaactctgcccttacatctccagcctttcgttctaccacacatcctttgcttggcttaccacccaccaaccttaggtgctcccaaatgggccattaaaaaaaaataccccaggcctttatatatgctgttctgccaggagttgcctcccagccccatctccctaactccctacttttccttccagatacttatcaaatgtcccttttccttagcaacatttcctactgaattcctcttctctcattcaggggctcctttagggtccacctctatactcctgtatatctttgcatatcctctaaaatgacatttaccactcataaagagtaaaatatattatttgcatattctcaaaaatgacatttaccactcactcccccacgtcccgtctatctcttctactaagcttcttgagagtagggccatgtgctccatccttagagctcctatgacctgcagtgggtttataaggttaaataagttattactgcaaacatggatatgtttgttgggtaattatttccctaatactgcctcatttccagagcttgagtgtctatccacgatcagttacatagcctatggttttttggttttgggtttttgcctttttttgagacagggtcttgctctttcacccaggctggagtgcagtggcgcaatcatggctcactgcagtctcaaactcctaggctcaagtaattcttccgcctcagccttccgagtagctgggattacaggcatgagccaccacatctgactaatttcatttttgtaggaacggggtcttgctatgttgctcaggctgctctcaaactcctgggctcaagcattcctcctgcctcagccacccaaagtgctgggattacagacatgagccaccatgctcagcctggcctatggttattaataggttgggaaaagtctctagagaagagatggtatgtaatggaggggattaggtggtcccaggcagttacttctaggtaaattgtttgaacaagtccaacatcctatgtctcttccttctttccttgttgccttccctctcaatctgtaccacatcagagaaattacaagtggcagctccaaaggtttcttcagttgacgctgtctccctatgtagtccacctgtgccctctggtggccacagtatgctaccacattccactttaaagataagtctggcttcaggtagcatgaacagcagtttaataggtccacaaccttggaattaaattatctgagtctactgtggttttgtattatgatttactaaaaatattaaataataagtaaacagtgcttgaaatataatagacaataaatcttagcttacttgcttttgaatcagggcccttatgagtaatggcacagaaaacttgaattatcatctattgattaggctggtggctctcaaacactgaaccccaagacctgtcagtggaaaaaagggctgataaggcaggtccttgactctagatgatactcattatgttccaaatagggatggaatgacaatagagtgcatttatagaacacttagtctcaggtacacctttttatcctcatgacaacacaattgaggtaggtgcctaggtatagtatgttggcctacagagaggattagtcaactggagcagaagtggggttgccactcaagtgaggttggagtgaccaaagaggcacggagaagccacagaaagcctgacgagggataatatcaacctcttttagcttaacaaagtaccaaaaacccctgatatccaatagaatcgaagtgttagccagtgtaaactgaactaaaaaattttctttttcggatgatttccatcttccgatggaagtccaggatctaaatcatgatatattaagtaaatcaagaatgttaaatttgttattattattattattattattttagatggtgtttcactctgtcacccaggctggagtgcagtggcaacctccacctctagggttcaagtggttctcctgcctcactctcccaagtagctggtattacaggtgcccaccatcatgcccagctaatttttgtatttttagtagagacagggtttcaccatgttggccaggctggtctctaactcctgacctcaggcaaactgcctgccttggcttcccaaagtgctgggatgtgtgagccaccatgcccggccagggatgttaaatttgtttttttaaaaaagcaagtttaagcacatatttactgaacatctactatatgcaaagcacttagacaagccctttcatactaaagtcttgtgtgtataaatggaagccaacagaagtcctgcaatgactttttggtggagggacatgggttcaactataaatagtatatattctatatacttatcaaattacattatatataattcattatcaaagaacagagattataacctggattggaattatatttgaggcaactatattcatggaaaaattttgcaaacccttttaaatggaataaaaccctaccttatctccaagccatttctagtagaatcaatgcttaatacagctttaaaaataaggtggcttcaacacattgtacgtgtctatcaatttatacacaaatgttttttgaagtgcctacgatgtgtccagcacagtcctaggcaccattaagattataaaggttgactgatccctgctgtcatggaacttacagtctaaagagccagagaacatctagaaaacatctaagtatttgagtggtacagacaagaagtttggagaagatgaggggaaaacaggtggagtagttgctggagtctccaagaaagcctggaagaaagaggattccagttagttcctgaatgtgtagggcctagcttagtagaaaacaggatgaggcatttgggcaaggcacacaggcagaagtcggtatgcagtaaaagaaaacaatggcctcttcagggagcattatgtacacagaattgtatcgagctaacaagttggaaatgcaggttgtagtcaactatagaggatactaaaactcagctgaatagttttttttgtaggcatttgaaagccactacagacacttgggcaggggaaatggtgtgatgccaatagatcaaacaatatgtgcagaatggactgcaggagaaaggtgagggaaggaattagatactgtggcagtaatcctgacacgagaggatgatgacagcaattaaggagctgacaaagaaatacaaccacaggacttagccagaagagtttgcctctcccacatgttaagaatttaaaatatgtacagtacttttaattcaaatgatcatattagtttattaaaagaaaaaatatccaaaataagctataaaataatctatttaaacatctgctgtttttcagtgattgttttgttaatgtggaagcaacattttctatgattaatctgctgttacctgttttgactgagctactacaaaaagaaaaatcactgaattgctatgggtttctgaaatatccaaaaaattaacctgaagcagggggaaaaatgacatcacaccattagcaggtattgtgtgaaacttctaaaaatgaaactgacatttatctgacttattaggaataaatactctctaatgaactctctaatgatcctctcaccctttctggaaagtgagaggcacgctgggctgtatgttctcccccatgattctgattaacaggatgctctattattataacctccctccctggttgtatccatgtcttattaatttttttttttttagagatgggggtctcgctgtgttggccagtctggtctcaaactccttgcctcaagtgatcttcccaatgtgctgggattacaggcatgagccaccatgcccagcctatgtcttaaatgcactgtatttccttgtactccagatccctattagtgaaatgcctattaaaacatttcgtaaggccagcatggcagtgtgcatcagtagtcccatctatttgggaggatggcttgaggccaggagttagagagagtagtgtgttataatcatgcctgtgaataaccactgcattccagcctaggcaatataacaagaccccatctttaaaaacaaacaaacaaacaaacgaacgaacaaacagaagtcttgtagtgcttccagcaaatcagcagaaaggaaaaaagagctctagagtaagaacagttgattctttttttaacaattagtgatgggggagtattcagatggccagctaaagagagaagttctagaactcagctagaccagtatattgctttatttaaattggctcaatatcctatctaaagctagaccagtggttttcaaagcatggagcctggactgcatcagctgagaatgtgttagaaatgcaaatttttgggtcccacctgaggtctactgtatcaaactctgggggtgggcctagcagccttgggttttaacaagccttccaagtgattctgatgtaagctaaatttggaagcccctgagatacacttactggaaagaagctggacccaggcccacagtgtacttgatgttcctgtggttggttcagttttcaaatttgtctgcacattggaatcacctggagagcttcaaaactaccaatgcctgtgacccgtcaccaaagattgtgatttaataggcctgggatatggcctgagctttggaatttttaaaggattctcaagtgatcctaatttgcagacaagtttggaaacccttggatgaatcaaaatacatcttgaatcaaggaccagagacagccaaaaacaaaagaaaagaaaacacacatattagtcaaattccattcaaagaagtttcctggctatttcagagtactggaatgttgtcacaataacattgctttacttaaattggctcaacaacctatctaaagaaatctttattcttgtaaactacattttctgaaataaattcctgcattattttgtttggaggaaatctgtaattttggaatcaataagggtttgtgtcactcttttcattaaatattcatctatgccatttaattgtccaaaaatggcatcaggaatgtctacacaagtggaaaggaactgtctaagtttctgtacacttgatatggcttctgtgatggtgacttttggttgctctggtaaagatacctccccttcatcttcacttcctgcttcactggtattttcgccagccaccatgtcctggatgatgtctgtgtcctgagagataatgagatcatcatctgcagtaacaaagtcctggaaatttacttcatttgggacacaggtggcaatagccactgtgtgccacaacttttcaatggcaatgtctggttcactggctgctgattctgtgtcacattctgcaaattccatagggacgatgcctgccttctgccaacatttcaccactgtggatggcttgactgaccaccacgctgcagcaatcatgtcgatggcctgcttgatgtccacctcttcttgatcctcactgctgttgagcttgaggaggatctgttttagaaggtggctctggtacagtactttcatggtgtgaattatgccaagattcagtggctgcaggacagcagtacagttggagggcagatacccaacctgaatcctttccaagtgtggaagcatgttatgagcagagcagttgtctatgagcaagaggatccggcgttccgccctcttcatcctggcatccacttgcatcagccactcattaaacagatcccttgtcatccaagcccactggttggctcggtaatcacaagggagggaatgaatgttcttgaggcagtgtgggctggctgacctaccaacaatcaatggtctcattttttcagtccccgaggcattgcaacaaaagagtgctgtcaaccgctgctttgctttcttgccccctctacagtggtctcctttagcagcaagtgtgtgctggggaagcaactggaaaaacactcctgtctcatcagcattaaagatatcatctgggctgtagtcagcaatcagttttataatttcccctgcatgccactcattaatcttatctattcctagaccattcattaacctgtcactatcttctctacagactgctttcaaagcaattccgtggcgatctctaaatctgttcagccagcccacacttgcttgaaaattgtcatagccaagcatgttggccaagtttagtgcttttttccgaatgacagaaccagtcacaagaatgtttttggcatggatttcttgaaaccaagcaaaaacagccttatcaatgtcatcataaagagcgctcctcatccttttccgctggggtcccacggatgcctcccgcaccttttcttcaaatttggtgcgatcctttaagaatgtagataaagtagagggagtgataccaaattcttttgccacatcacctttcctcttgcctgagtctacagctcccacaactttcattttctcctccagagagaactgccgacgcttcttgttccccttgtttgccatttccagggaatgagggctggccacaactaacaggactgtctggttcctcctcgcggcttgctttgccccaagtgtggaaagctgagaagacaaaatggagtacctatcaggaaacaatggatttcccctaaaagatggttcaggatttttacaaattgtattaggaaaggacaatttacagtcaaagtaaagaaaagataggattcatgctactgactttttgtagaggctacttgtaaagactcagaatgtttgaaacagaagtgatcttatctagcttacttaaacattctgaacctccataaaaatgggaataacaatgtttgctctgcctaccatgagaacagattgaaataacaggcagtgaaagagcttggcaaatagcattgcactgtatacattccgagttattctccagcttctttgatggacacagaaactggggccctgggaaggggcctacccgggttcatgcagcttagatttcttaactcagattactatttctgccaggccatggtcctgcttgaaattccaccaaagtgagatcttcaaagctctaccaccatctggcctggaaagatttttactgtgggaagatgtttctggtagccatacattcattttatatttacaggtgccaagctttaagggtagagtaatgaacaaaagagtcaaggtccctgttcttatgaaatataaaatgtggtgggaaatataaaaagtaaacagataattacagagggtgatatgtgctataaaggaaataaagactatgacaaagaataaaagaggaagatctacttattatacaaagggtggtcagggatgtcctcactaagatggcactgaagctgagatctccaagaatatggggaaagggctgtccagcaaaagacatagcatcagcaaaacctcaaaagcaaaaataggccgggcgctgtggctcatgactgtaatcccagcactttgggaggccaaggcggccagaccagcctggccaacatggcgaaactccgattctactaaaaatacaaaaattagccgggcgtggtggcgggtgcctgtaatcccagctacttgggatgctaaggcaggagaatcacttgaacccaggaggcggaggttgcagtgagctgagatcgtacatttgcgttctagcctgggcaacaagagcaagactctgtctcaaaaacaacaacaacaacaaaaaacaaaaaaaacacacacaccgaaaatagcttgaggtattcagggaactgaaatatttgcatgaatccaagtatatgacaaaggtgggtggccagaccattcaaagatgccatggtaggctggatggggtggcttacgcctgtaatcccagcactttgggaggccgacgcgtgtggatcacgaggtcaggatatcgagaccatcctggccaacatggtgaaaccctgtctctactaaaaatacaaaaaaaattagccgggcgtggtggcgggcgcctgtagtcccagctactcgggaggctgaggcaggagaatggtgtgaacccgggaggcggagcttgcagtgagctgagatcgcgccactgcactccagtctgagtgacagagcaagactccgtctcaaaaaaaaataaataaataaataactgggtgtggtggcgcatgcctgtaatcccagctactcgggaggcagaggcacaagaatcgcttgaacccaggaggcggaggttgcagtgggccaagatcacaccactgcactccagcctggcgacagagcgagcctccatctcaaacaaacaaacaaacaaagatgccatggtaaagaattggtattttgagtgcaacagaaatccacggatgttttcaggcattttaaaaggatcactttggctgttctgtggaaaatggatcaaagaggcaaagagaccaattaggtgacagattatggcagaagtgatgggcaggttgtagtacagtccctctctgggcctattttctttttttccttttttttttaatacatatttttgaaaagtcccatggttgcaaaccacaagcccagatgatgcctaaggtccttccagatttaagtcttggaccctagataggtgcttcaaactcaaatgcctttaggggccaggatggtggcgtaagtgagtgaaacagggattgaagtatttggagaatggtgtggtgtatcctgtctagaagtattcagaatttaaaacaaacagtccccctgccctacgctggtccaacaaaacatgatccagcagtagcagttttgggtaattgccttcgtaggcattttatcatgagaatccttaaaggacaagagaacctgctgtgactttatgctatgactgtcccttctcaagggtagatttttactatcacctccatacatgtatccatccattcatgacatgtactatgtattaagcagtatgcttgatgccagccatacagagatgaatggagcatagtgcccacctttgaggagcctaccagggaagacaaacactagagcatgtgaaaactaaatcagaggttacggagtactactggaacataaatgtgcagataatcaactggaatggagcatggatgggcagtgcacttcaaagagggaataatatggtgggccttaaagaataaacaaataggaactcatgagatgaaaggaaatatttaacatgaaaggcaatgaaatactatataggaaatagaatgtcctggtcaggaacaaaaaattctttggagaagaaagcaaggaccaaatcacaggaagtcctagtcaggtttctagcttgctttgggggcattaagaggcttttgacggttttttggttttgtttttctggaatgacatgatcagatttacaatatagtcttttggttgcagggtagagaacctaatgggtaaagttgattttcctaagagatggccttaaatctgaagataaaagcaggctaaaccagtaggccatatacagtttggatgttaatttgagtgcaataggaagctattgaaggattttaaggaaggagagatgactgctgtgtaaagaatggaagggtatcagagaaaaaagcaggagtccacatgagataatggtggcttggattagagtagtaatagagagatggtgagtagtagtcagtctggggctatgtttttgcaagccctgtgctggaccggatgtgaggtgaaggaggagtcaaggataacgcccaggtttctggtttgagcactgaggaatccagcagatgatggtgccatttactgaggtgggaggatctactgcgtaaacctcatttgttaagcactttacttgcttaatattgcttacttgtggcagggctgggattcaaacccaggaggctcacaacaaagctagcactccaaacactacagagtgctatatagctggttctgggaactactaatattgagaggagacatagaaagagaatgaagcaagagccaaatcagacaagtcttggtcaagctaagacgtctgaattttattttaagtgaatgagacactggagggttttaagcagggagtgacttgatcagacttacagtgcaaaatgatcaatctgactgcttcgtggagaatggattgtagaggggatgtggggagaactacatcagtccaggcaggagatgatggtggctagaaggttggtgatggcggtagatgcagagaagtaggcagactggaatacagtgagggttgtgcgggaacttgtacaaatgtggacaacttgtgacactggagagaaaggacaatccaatccaatccctatttgatttacggaagctctccatacggtcattcagctcagcttgagtcactccaggaactcactaccatcactattcgtgggccagtgggagagacggattgagggcagatcactggagtgatgaaggcgctacttgatgcggcactacgtatgaacccgatcctgaatgagagggaaagactgagacaggctgaggtcaggccttgaacgtcgtgctgaggagagggtggtattgtaggcttcccagcgcccgacgtggctctgaaaggtgaggcggggcctagatccctcacgctcagcacagccccgcccctgttacctgaacgccccacagcagtgcccgggggctgagcggccggggcgtcccaccgccggcagccacagcttcctcctccgcccgggacctctggccggaagcagtccgttcgccttactagacccgctccaagcctttgagcagttcgtgtgggtccgctcccaagctagggctgggctgttgcgcttgcgccaggggtcgcatgcagtcacgcgctgccgaccgcttccggtgcgccgcgagggccgccgggacgggtctccctggcgatccgtggtgtgccgctactgccggtgcagccgccaaaccggtgcctcggtgacgaccgtgtccctgccgtcttcctcgagctccccggggcttgacccccggggccctcggcaggcatcggtgaggagcctgcggagcgaacctgtgctcctattcttgcccttcaggaccccatatcgcgactccgaggaggggaagcgagaggggctgtcgcgactccgcgccgtgtgtcgccgggcggggccgcggggccggggctccttcagcccccgggatgcgcgcgcgagccctcgcctccacttccttgttgctgctgtcacgactggagccgcctctcgccgacagcggggagcgcgagtgcgccagccatccccctcgtccagccgccgggccaagcgcctccgggaatgtgagcggcgcagcttgcacgctcctccgggtaagtcccgccttcgagggccgcgccgagccgctgggcgacctcgagttggatgctgcggctctctgagcctctactgagtcttccacaaagtagggccactgagccttagtgtcctccttccgcaatccgtatgggacattcggatgtcccagacgtcttagcttgaccaagactttgtctggtttggctcttgcttcattcatgacccagaatgagggaaaggagctagcccagagtcaaactgtggcccatggctgagccctcaaaggcaatctcgtgagattccaaggaggatctgatgggacagagaaagtgtctcgcatatttcaggtattgaccttaactctgttttacagatgaaataacggagacttagggtaagtagattgcttaaggtcagaggtccccgtgctggtgcgactggtgtagtctgtactagaacccggattttctgtcctctagagcccttcgtttttaaccttaaattgtcctgcctttttttgcattgctatactgctgcctcgagtctgataacaaacttgtactcaggcttagaacagggtaataaaacaaacaaaaccgtagggtgttgtcttcctgccctcagcccaaggtggctgtaatgagtgtttcctaacccgttttgcgcagggtgcttagtaccctatatgccattcattacagatgctctcctgcagttactgcccttctccacaaggctttcagccgcccagaagtcaattcagggcaaaaaagcgcagtccccacgtagccttgatttgaactactgcttcccttatcctttactggcctattgcttacccagccaagttgtagactgtgttctcttcctgggttgcactatggcagttagaatgtaggtttttgttttgtttttctttgttagtttagtttttgtttttaataggaagaggaatcatttagagatgacagagaactaggaagaacctaaggaataatgtgtgctttacctggggtatatcctgaaaattataggtgaaatacagtgtgtctgcaatttctaggagaggttttttgttgttgtagttgtttgtttttttaagctttcgcaacattgtcaaaagaattcttgcctccaaaagactaggagccactgggttcatccttttctcacagtagaaacagttgaaatttaggatgtggaatagacttctctgagatcataaggttagagtttaggtctcttgactccacatgcagtgctcattataccttatttgtggagtgaggtctaaatgagaggtgtgtgggctttgtactgcacgtatcagtcccatatttaccaccacaactgcctcttcccagaattctaaatttcctcctgacagattttcaggggcaactatgttatttcctcttgtaaaattcaagtggtttctgtgagcctttctccctccaaggattgagacttgtggtaaaagtccaatttagaacttggctacaaaaaaaactaactcttcttgaactggttattaagttttttatgcctcttttcctagacataaaagctgttagtagattctctgttttttagcccagcaccagagagctgatgttggttggtcagatgactgtttagatctgtgctgtctctagctcctagcatatgttgctatttcagttaattacaattggccaggtgtggtggtggctcatgcctgtaatcccagcactttgggaggccaaggcaggaggattgcttgagcctaggagtttgagaccagcttggataatataatgagatctcatctctacaaacaatttaaaaatttgccagacttggtggtgcacatgtgtagtcccagctacttgggaggccaaggtgggaagatcacttgagcctgggaggtggagactgcagtgagacaggatctcatcactgcactgcagcccaggggacagagtgagaccttgtcttaaaaataaataaatttaaaaataaaactaattcaattcttcagtcacactagccatatttcaagtgctcgatagccatatgtggctggtggctactatatttgacagcacagatgtagaacatttccatcatcagagtttattgaacagtgctggtttggagggttgccagtagagatggatagcagtgtagcataatgaaagaaggcccagggagttggatttttgagttaaaaatctatctctcaagtccctgcttgggcttggtggccttgggaaggttgttaagcatctcagacacagataatagtctttaacagaggctagatgtggtggctcacgcttgtaattacagcactttgggaggctgaggtaagaggatcgcttgagcccaggagttcaagaccagcctggacaacatagcgagatttcatctctattattattttttaaattatataaaattaaaaaaaaaacttaatgaactcttccatttttttttctgccaattacctgactttaggaatgaacccagcagggcacagtgtaatcccactcatgcctgtaataccaacagtttgagaggccaaggtgggcagatcgcccgagtccaggattttgagaccagcctggccaacatggcaaaaccctatctctccaaaaaattagccaggcgtgatgacatcacctgtagtcccagctactcaggaggctgaggtggaaggattgctgagcccaggaggtcaagactgtagtgagcccagagtgtgccactgttctctagtgacagagtgagaccctgtctcaaaaaacaaaaacaaaaaacccaaaaacaaacccttttcatttgcatagcacttgactattttctttttttttttttaattaaaaaagatttttatttttttaatagagatggggtctcactatgttgaccaagctggctggcctcaaactcctggcctcaagcaaccctcccatctcagcctcccaaagtgctgagattataggcgtgagtcactgcgcccatccaattatttttaaatagagttgtgtctattgtatcctttgagtcttatcactataaatctgtgggaaggtagttgagacatgtctttttttatacatgagagagaaagctgaacaaaaagcagctaaaagacctgaccaaaattgcacaagctggcagagtataaagaaatcttttacatacaggcccttactacatgtttgagtgaatcaatgaagggatttgcttaagttgatgaaacataggaggaatgggccagaacttctgattcctggccaagcatttttttttaacctgtttccatatagaattgttataatttggggctaataaatctttgtgttaaaggggtgggtgggtactgtatcccatgaatataagtgaaaagtatttctaaggcagtggtcacaaacttgcccggtctgaggaatcacctgaggcatttgttaagcatgtggatttccataccctcgggagattctgctccaggagggctgaagtggagctctggaatcttgtgtgttaaacaaccaagccaggtgcttcttaggatatattgggtttgggaaatgtctaagccttaaggcactggcagaggtaaggggttatttgatcaggaagctgctgcccctcttaggggagattctggaaactttattttgactttcctttcctttagccatggacgcatcatatgatggtactgaggtaactgtcgtgatggaggaaattgaggaagcctattgttacacctctcctgggccacccaagaagaagaaaaagtataaaatacatggagaaaagacaaagaaacccaggttagccaacacattttggttgctgctagcatttataaacagaagttgcttggagagctgcattgaggaaaacttttaagactctttgaaaaagagtgttatgattgaagtcctgtgtcgagggatgaggagtgggaagtggagggatttctgccagcattgccattactggccagactttgcttttgttttcaagttgtcacaggaaattgtaccatactgatggtagaagctaggtacaaaagagctacattatttattattatgccattgttgttatttaaacatttaaaacaaagcattaataaaattacaaaattagaaataaggctgggcgtgatggctcatgcctgtaatcccagcagtttggaaggctgagacgggtggatcacctgaggtcaggagttcgagaccagcctgaccaacgtggagaaaccccgtctctactaaaaatacaaaattagccgggcgtggtggcgcacacctgtaatcccagctgcttgggaggctgaggcaagagaatcacttgaatctgggaggcggaggttgcggtgagccaagattgtgccattgcactacagcttggccaacaagaacgaaactcctctcaaaaaaaaaaaaaaaagaaaagaaaaagaaaaaaaacacacaaaaagaaataataccaattatatctgtacagaatatccaaattgtagctctaacttcactcttgactgtgaatacctcaaacttgtgaaactaccagcattggtcattttgattggtctgcttgcttccctctctcatccttggggaggtgccattgaccaggttggtgaccaaaggctgcgtagaggagcacggagtgtgagtgataaccagccccttgaggaagctttccctgagagtggaatgacaggacaggacacctgtatctatctttgctttaaaatcattcctgcacaaaaagcgatctttaggaaagccagtcaaatgagcctttgcttccaggtttctgaaggggaaacagccacttgctatctttaccattcattttcccctcctcccttggagccccttatcttcctgggtagttactcctgactgtaatatagtggctctaatgtagtaactttaatatggtagcttatataagcatttctcctataccatgagtttttatattacaaattgaatgtaatataatttgtgttgtactgacagctatcagttataatcaggaataagattataacttattataacaccatctgaggatgttatttaaatgtttgtttgcttgactttcagtccctatttagataaatgcttagaaatgagaagctaggttttatcaacctcttgactacccatatcttagcatagtagtacttactggttgaatgaagtcctgggtcgagggatggggagtgggaagtggagggatttctgccagcattgccattactgggaaagcctgaagaagtcattgcttcctcaggtctgcttaccttctgtactattacgacatctacctgaaagtgcagcaggagctcccccacctccctcagtctgagatcaataagaagattagtgagagttggaggcttctcagcgtggccgagaggagttactacttggagaaagccaaactagagaaggaaggtttggatcctgtaagtaatttttttttccagctattttttccactggttcagtgatgaaggccttgggaaaaccaagccccttgttctgtttccttttctttttttgggaaaagtttcatcgttttatccttcttgactctgggcttgcttgtttccattttgataatgccctgcactctcttgtcctcttcggttgcagcaatacgtggagctgacatttttttgtgttttctgcagtgagccttaggttccttttctaaattttagtgtaacttggagcccctcatagttactataaatagtagctttaatgtagtaaactttaatatagtagtttatataggcatttctcctacgccatgagttttcatattacagattgaatgtagtatattgtactaactgctatcagttataatcaggaataaggtttgcatgtttagaggtagatagagctgcttgtgtaatacagtaccacattattttgttagcactggtggttggaaactatgctgaaagcaaaaatgcaagtaaagccaaagatggtggaggagaccaaggctttgggtgcttgggttaaaggactaacaaggaagcatttagaattatgtctgtcagcattttcttatttctagttcacagtaacaaaatacactgacagctatttaaactgctgggtttttgtttttttgagagtatccctgtcatggcataaactgctgtttttttaaactgaaattcctgcaggaagaataaccttgctgttgcaggctggaaccttttatccttaactccttatttcaatagaaacagttgtctgtaacttctattttggtaatgtagagcaacagcaacaactacgttatagcagaacaggttgtattttcccttattggagctcatcagctactgccatttaaattattttgtgcttattggcctggcattcttctttctgggagagctttgtcttacctacaggcttggagatgctactctctgctccctcctctaggtgatttgtttattaacagtgaatctgggaaataatccctatagtggagtggagatggagtctaagaaaagcttatctactccctttggtttccttattataataaaatcagctgtctaggctgggtgtggtagctcatgcccgtaatcccagcactttaggaggctgaggtgggaggatcacttgagcccaggagtttaagactagcctgggcaagttggcgaaactctatctctacaaaaaataggaaaagattagccaggcgtggtggcatacacctgtagtcccagccactcaggaagctgatgtgggaggatcacttgagccggggaagtggaggttgcagtgagccgtgattgtgccactgcactctagcctgggcaacagagtgagactctgtttcacacacacacacacacacacacacacacacacacacacacacaaatcagcaatctttttgtgcatgataaaatcctacgtaatcctggagtgatttgatttttaaaactacacactaatgtagatcattatcaagactttaaaaaaatttaaatcatctgcaatgattcttccttatttacatgcttatttctatctaccactatctctaccactgccaccaagaacatgagtaggttagttctgataatagctgagtgaccattttaacttttgagtcttggtttcctcatctgtaaaatggcagtagtctcttctcataatgtttaaaataggtaatgtaaatcacctagctgaattcttgataatactgacataataaatattaccctttagtagattaaacattcattgactatataataaggaaaagtggcatttattgagtacctggaatgtagtaagactgagtgaagctttatgtgctgtgtttgacctctcccagactgcctggtgtgatgggaagaccctcaatgcccacataccttgggagcctgtcagagccctgtggcaggctgtcctccttagcagcccttcaggtctcttgccaagtgcaggctccagtgatatgccttctagtctataaaatgagtatcattcaggccttccaggtttctttgtgcttggatttgttaagtccaggccatgctgtgtgtatttgccaccatttagtcttgttctcctaacatggctgcttcaaagggtggcttgagaatgccatttccccattacctctccaataaaggctccataaaagattcagtccatctgcttttatgtttcatctgagtgctgcttttaacttttcatttctgagtgcttcctttatgccttaagtagtctcatcgacttcttgcttttgatttattgaagaatccttttgtagttgactttagtgttcattttaaaagatacttctgaaatttttttttgttctgtttaattttaggtctcatttaactgttcactttgaacttttctgttttccttattgggtgcctttaagtttaaattgaaaaaataaaacataaatgactttttcttggtgccaattagccattcaggactgtgctttttagtacctggccttcttgatacttagaagacctggcctggagtcccagctttactgtttactaattttgtgtttagggaaagtttacctccctgagtttcatcctaaattttctcatttgttaaatgggaataataatcttatctaacataatagtgttgtttttaagataaaatcagataatgtgtttgaaaacattttctaaacctgaaggtactgggtcattgttaatattcacatttttttccgtagtatattcaggaccttgtcacataaccccttctatatatactttctgtcacgaagccttctaatgaagacccttagctttgtgatctgttcatcctcttctttgtaagtctggggaaaaccagtgaggtcagaatgcttacttgctgccttgagtttcatcttagcctgttaacttgtattttatgctttttgggtttttattgagcgttatacattctaatgtttgaatcttatgctgctttggaatcctaaagtatcagagctcaaaaggaactcataaattgccagattcagctcccttgttttacagatggggcagctgaggcctcaggaggggaaaggatttgctcaaggctatgccagacctcaggttctagctcacagtttcatatggcaagaccagtgctctttccagagttcagtccatgctgtttcctgtgtgactgagtgaataagctacattggctaaagtgtgattcaaatgaagatgacactgctgttgacaggggctgaccttatctgaattaggtcaagagagtagagtttttccagtcccttttgcaggaaaaaaaaagaacttacacatatatatatatctttctctctccatgtggtcttagtccatttatctctgcttgtctcccccttcctggcttcctcatcctcagaactctaagctctctgcactgactgctgtggttccggacatcccaggtttccgcaagatcctcccacgctcagattatatcatcatccccaagagcagcctgcaggaggaccggagctgccctcagctagagctatgtgtggctcagaaccagatgtccccgaaaggacctcctcttgtgtccaacactgccccggagacagtgcccagccatgcaggcatggcagagcagtgcctggctgtggaggccctggctgaggaggtgggagcccttacccagtcaggtgctgtacaggagattgccacctcagagatcctcagccaggatgtgctcctagaggacgcttccctagaagtaggggagagccaccaaccttaccagacaagcctggtaattgaagagaccttggtgaatggctcaccagacctccccactggaagcctggctgtgccccacccccaggttggggagagtgtatcagtggtaacagtcatgagggtaagtggctttggtactgaagtctttggctttgtctggagttacttaaagggcagctagcaccatacagtgtgattccagagcagtggtaatcaagagtactggtgtggcacttactgatactgcagttctcttgaatgtgtcttgcccctgggctcactccagagttccttgaaatttctcaggcactcttaccaactctttgcccagcttagccagaattttcttcacatgagatggttcataagctacattagcaagaaagctgcaaattgtatttgaattatccacgagtcaaagctaggatctgtcaggcaatttagtatcagtcaggattttatgttttctgaagactgcttccttttcttgaaatgggatttcactctgttgcccaagctggtcttgcattcctgggcttaagcagtcctcctgcctcagcctcccaagtagccaggattataggcttgtccatcacactggctccctgaagactatttcagcaaacaatggcaccttgagctgtgtacaagaattttcacacaagacctgtacccaggtcttcctggattcagatggggtaggaagaaaaaagttatcttcaaggccaggttgatgggacttacctctgagaaagaggaagcaagtttctacagtggcctaagtgtcattctcagttgaggggaaaacagcacttttagtgatcccaacaacctcatcccctagaagtggaagtggagagaaactgctaccatgccatagtataatatataacctgtcctctataaccttggagaggatagcattctcagagatgggagtctttctgtgcaggctaagaggaccagcttgctgtagcccttatggcctgggcagaagagaacaagtacccctgcaatctgtcccagggctaaatccttatttgttgcctcagtgctgtttatgataatgaagcgtgcaactagccggttgttgttgttgttggttgtttttttttggtttttttttttttttttgagacggagttttgctcttgtcacccaggctggagtgcagtggcacaatctcggctcactgcaacctccacctcccgggttcaagagattctcctgcctcagcctccaagtagctgggattacaagcatgcgccaccacgcctggctaatttttgtatttttttttttttagtagacatagggtttcaccacgttggccaggctggtcttgaactcctgacctcaggtgatccgcccgcctcggcctcccaaagtgctgggattacaggcgtgagccgccgtgcccggccgccactagcctgtttaaagcaggtaaatagggtgctgagaacacttgaaagggttagaattggattctctcactaactgcttatgtgatcttagaagtcctaaatgtcttagaacctcagttttctcatctataaaataaacatagcacacttcctgtggaaatagttttctctttgttcttaaactttttgagataatcataaattcattccttttgataagcacattgggatgagtacactgtctgttattaaacttaatccaggcttccagtgttgagtggcctgggtgttctttattactctgtttcagtgaaactgtccttctcttcattgcccataggattccagtgagagtagctcctctgcaccagccacacagttcatcatgttgcctctgcctgcctactcggttgtggagaaccccacctccatcaaactggtcagtactgtatgtgggggattgatggcaattagggtgtcataagcattttttttctaagtagatttgtctttttttctttctgagctaccagttgtaggaccaagaagatttctaaaagtcttagaacctcaggatgcgaggactggcaaagatttcagggattatgtggtccatatgttcttaatgggggtgagggggttgtagatagatctccatgggatccatgaactcacctcaagttttatacaaacttttttcctggaatggattccatgacttttataaaattttcgtaagcatacatgatttaggaaaatgagcagccactgatctaattcaatactgtgatcgtacagattaggaaaagggccataggagagaaaggacttgttcaaggttacaagacaagtcagactggattcgtttcttgattcccagttgatatttttttcagcatcggggctgagatttatccctgtttatctttttctcacactattataaatggcatttttagaaaattttcaatatctgattgcctacaactagtatatcgtaatacaattgattgctttgtatattgggcttgtattctacaactttgcttaactcacttattagttctggtaacttttgtagatgctgttgggtttcctacaaagttaatcatgctgtctacaagtaatgacagttttatatgtcctttctgatttgaattccttctttttcttgccttatgatattgtctaggacttctggtacaatgctgaatagaagtggtaagagcagacatctttgtcttgtcctcatgtaaggaggaaaggattcagtccttcttcattaagtatattaactataggtttttcctacatgccctttatcatgtttaggtagttccctctattcctaattttctgaaagcttttatcaggaatgcatgttggattttttcaaatgctttttctgtgtctattgagagtattataagaattttccggaagttggttaaggtggtgaatttcactattactcaaattttaaaccacccttgtattcctgggacaaaccccatttgacagtgatgtagtatccctctcatagattgttggatttcatttgctaaaaagtttgctcagaatttggctcagaatttccttatacagtctctgtccacttttcatatcagggtaatgcttgcctcttaaaatgacttgggaagtattttctccacctcagttcttttccttaaatggtagtattaccagtgaagtcatctgggcctggagttttctttgtgagaaggtttttaactgcaagcccaattttaaaaatatgtataggactattcagactgtctctttgagtgagcatttggtattttggctttcaaggaatttgtccatttcatttaggctgttaaatttattgacataaagttgttcataacattcccttattaccctgtaataaacaatgtacttatctacaaagataatttgaactgttgtttccctattgctgacagatgaaaaagtttagaccttaaaataatacctgattgttggccacttctggttaaggccactctctccagctttccagtgacaggtaatgctttacattacaaccaactaatattctaagattcttagaaatggacaaaccacttgttgcttattttgattgtttctggacagttactacctgtgtggaaaaattcagggtgctaaacaacagtgtcactttatggcctggtactacactagagcatgtcacaagttcgcaagggcggtggctgctccctctactaacggatactaccagagaccttcacacagtgcagacctcggttactaacacctaaatattaacacccatgggatttgcagtccctatgttcatgtctagtacttgggtaagctccacaccaggcacatattgttttatgcaatctttaaagacatctgcaatagacaatatgcagtttaaacaaactgtgaggtttataaacagagaattctttacgtttgctattatgtcataacaggcacaatctgaaatacaattttgtactagcagtgtataaaaatacttttaaacgatactttcgataggtacagtagcactttaaagaaaaccactgtgtagttattccttttgaggacctactaaaacagttcaacttactgcccccagctacatctaaagcacgaatgtggaaagcaagttctcttacccaggtacacaccacacacacccacatgctgaaacagtctccatttatgatgcatgctgatgaggcatcaatctcaaacagggtatgagatgacagtgtttggtgcctgtttccatttccaggtttggtatgaatgaacaagaggcaaaggcaaggtggagtctgtgtatgggccctctctaggagtttaatctggcatatcaatatttaacttgggaggtgggggaacatatttcccagggattaaaactacctggtcttcccaaacactggagcaattttcggagcttctggaaccaatgtttcttcagcaccttcgctatcttcctgatggagatcatatgaaatgttcccatattctcttaaaaatgggaaaatttcaagcagaaactggcagaagtctctgcgaataccaaaccaccaatgattgcccctttttggcctaaatgttgtggtcattaaagttagtaacaaaagccaaagggggacagatatggagatacaggagaatgtattgcggccatccagtctgtgaaccagcaggacttcaaaggtgagcagggcacgatgacagtcgttatccagctgatggccatggtcacgtgtgttcttcactgccctggtagttctcatttgttctttttctagtttcttaaggtagaagctgatgtcattgattcaaaacctttcttttcttttcttttctttttttggtaaataaggtttcactctgttgcccatgttagagtgcagtggcacaatcatggctcactgcatccttgacttcctgggatccacctacctgccccagtctctcaggtagctgggaccacaggtgcataccaccacacccagctaattgtttcaaattatttgcagagatgggggtctctctgtgttgcccaggctggtcttagaactcctgggctcaagcaatcctcctgccttggcctccaaaagtattggaattacaggcgtgagccaccgtgcccagctctttctttcttttctaatgtaggtgcttactgctatgaatttccctctaagcactgctttagtggcattccacaaattctgatatggtgtgttttcattttcattcaattcaaatactttctaatttacttctttgacctatgagatacttagaagcgtattatttactctgcaaatatttggggattttccagatatctttctgttattgattaataatttaattccactgtggcctgacctttttgatttatttaaactgaatccctttaaatttattgagacttgtcttacggcccagaatgtggtctgtcttgataaatgttatgtacacttgaagagaatgcatagtctgctattgggtggaatgttctatacatatctaattaggtcaagttgattgataacgttcaacccttttatatccttactgattttgtctacttgttctatcaattataagagaaggcatctggccgggcacggtgatatgtgcctgtaaccctagcactttgagagactgaggcagaaggattgcttgagcccaggagttcaagaccagcctggacaaggcagggagaccccgtctctacaaaaagcaaaaaatagttgggtgtggtggtacacacctatagtcccagctactcagggctgaggtgggaggattgcttgggcccagtagttggaggatacagtgagctgtgatcgtgccactgcactgtagcctgagcaacagagtgagactctgtctcaaaaaaaaaaaaaaaaaaaaaggaggtgacatttaactatccttgtagatttgtctgtttcttacagttctcttaatttttgtgtcgcaaattttgactctcttgcgaagtatgtaaacatgtaggattgttgtgccctcttgataaattggcccctttgttattacaaaatgacctttatctctagtaatctttgctctgaaatctactttgtctaatatctagcttttaaaaattattgttacatcaagaaatctatttttccatccttttaactaatttatatctacataaagtgtttttgttttgttctgctttgtgtagatagcatatagtttcaatataaaagcaagaccctctgacagtctctgtctttaaaagaggtggtttaagccatttatatttaatgtgattattgatatggttacatttagatctattattatttgtctcatcaattttgttctgccttcttctgatataagtattttttatggatctgctttcttttattggcttattagctattgactttgttttggttattttagtagtttctttagggctaaagtacatatttttaacttataagtttatcttcagagatctctactgagataaacaatatgttgtagataataaagctgcaatattttaaaataggaacagcctgcagctttgactcatggagaaactggttatttctcctgagtctttattctcctggaaattactgttctttcatgctctaataaatgtcagccaagcacttctagaaaagtgttttatgattaatacttaggactgaaacgtcatccttgaacattagcactttttttcctaaagtcatttctctagcctacttaacaatgttaagaatttccaagtccatggtaatttacttatgaaactaacctatcttaaatttttactctgctttcttgaggtgttcagaatgagaattatacattggccataacctgagaaaggatcagagatgttttatattccactattaatagtctctcacaagcatgtagaatctaagtgaatgttttctcatttcttatctcactttctcagcaagacacgcctataaaataggaagaacaggcgattttacagaggaagaaactcagggcccaagagttaaggttccttaccaccaggtcactcagtgtattagtggcaaaattggaacccaaagcctggtcttcctctttttggtgccataccacttcacgctcatccttgacttaataccactgtcataattggaagccataattgaagccttttccttaggcttccttgcagaggtagctaatggtagtttggtgtttccccaaggaagctttttgcgttttggctgggctagggaagctgggattaatagctgagtaaacattcatatgtgacagaacaaatatgacagagaaatgggtttttttccagccttaatctagaagcggagcatgactaatgaatgagtcgtttttatttgtagctgaaatattataacccatagtaatacattttgctcaaagggagatcagtggagatgataagagccagtggctatatatattaatatgcaaataactacattctgttgagtatcaaaggatagggcctggcttatagtcctgaactgcccttattttttcagtgaccatggatctatttttattctgaatcccaggtccttggttgtctgaagaatgaagatgaagcaaattctttgaagtatttagagccagagggtgcagctggatgcatagaaggaatgttgggccaagaatagagaaatatgggttctaggtctagctctgcccttgattgatgatttgaggcaaagcatttaaacctcagtagtaataatacgtacttaatacgattgctgagagtattaaatgaaatattggtaaagtgtttagcattgtgtggtgcctagctcaatgcatagcaactatcactttcttcattcttctggtacctaactgtaatgttgggcaattgtctttccccatttgaacttagtttctccatttctaaagagtgaatttgttgtattgtaggacctttccaacactgaccttttatgatatgattatgaattggttatctttccacaagcttgtgacctcctggtgttgctgtgattatagtggtcatcagtctgagagaggttgttctattgattctgatgtgctctttatttacagaccactacatatacccgccggggccatgggacatgcaccagcccagggtgctcctttacatatgtcaccaggcacaagccacctaagtgccctacctgtggtaacttcctaggagggaagtggatcccaaaggtaaggtccattggctgttgctgctttggaagcctcacagaatagactttctgtttgccattaggaacaggtgatttttaaaaagttaacatttgtttttactgtctgactatacaagtaaatcatttccattgtatatagtttgtttaaaaaatacaaaagaaaaatggaataaattgttatccaaactcatataccatccaaagaaaagccattattaacattttggtgtacttctttccagtctttttttctgtgaataagttctgtatctgtttttttcttcttctttcccttcttttttttttccagtagagatggggtcttcctttgttgctctggcctcaaacagtctcctgtctcggcctcccaaagtgctgggattacagcactgtgagcactgttttcccttttatttttctttctgttttttcgtggatatctccaatactataatattttgctttttttaatttaacatatcatgcctttaaatagtcttcaaaatagtacctgtttcataatttccatgaactactacaccatgtttatttacttgtttctgtcatccccccgtctgtatatagagatgtctgtatctatatgtctttaacatttttatttaacactcatcatcagttaacaatgtttctgtttatgtcacattgtgagttccttaatgaccttggtatctcccacagcctttgcccatagaagacactcaataaataaatgagcatcactgctgtgcccttctgaagttccgtttaacatgttgtcacctgtgtatgcttggtgcgaactagataaaacatatatacttgccacattttttatatgaaactatacattttaagggctaaaatggatggaagaggcagtaaattctcacctagttcagagaggagagacatttataaggactgagacagacaggcaaggtattatagaagagagagagttgaagattcaacagaatttgggtgggtagaaaaggaaagagaggacattattttagtgaaaatggcttaggttaggttcgtgattatcacatgtttaactcagcatggtccaaacttgtatgtgtagaaaaaccttgtatagcagcataccttaaacttctctggggcaattttcacatctctttgagaaatactgggatggtgacttttgccctctggatgagtgttttggcttctggctaagttcagggtagcactaattccaggagacaggataattaagaacacaattctggagttagctacctcagttcagacccctgcttcccaaggtttttaactatgtaatcttggtcaagacattctatatctgttcctggatttaagttttgtctcatctgtcaatggaagttagtacctacttcattagggatgttagcagggtcaaataagattatccatatagactaaatggcagtttctggtacatattaaatcctcagtgaatgtcctgctatcatcatgatagacatcaatgtaattattagccctactattgctcttcatgttgtcaggaagggcctagtgctaatgtctcacagggggttttgtctaaggctcttgtgccatcttctctgatgtgcctctctgaagccatcagtgtattcacaatgtattccccaaaaaggcagttctctaactgcagtggggagattgaactggatagtagtcagaatcttccttggcctttcttgaccaatgcgaaacaggtctcaaatgaccatatttcctgtgcttatacatgaaagactgtcagtgatcactgtgggcttatccctccttcaggctatttttactttggctttttcatttcttgtatgtgtggctttctttttcatttcttgtatgtgtggttttttttccactttgaaataacttttttttttgggacagagtctcttgctatgttgcctaggcccatttcaaattcttggtctcaagtgatcctcctgcctcagcttcctgagtagctggtactataggcatatgacatcataccatcatacctggctttaactgaaacagcttttttttttttttttgaagatagagtcttgctctattgtccaggctggatagcacgatctcagctcactgcaacctctacctccctggttcaagtgatccttatgtctcagcctcccgagtagctgggattacaggcatgtgccaccacagccagctaggtttttttgtatttttagtagaaatgggatttcaccatgttggccaggctggtgtcgaactcctggcctcaagtgatccacctgcctcccaaagtgttgggattacatgtgtgagccatggtgcccagcctgaaaaactttagagccatggttctcttactaagatcaagctcatggcatgaaaacaatttttttcttagctaccttcccccatcttgacttgctaagtcagaatttaccaatgtgttctgcaaggattaccatgtcaagagtagatactgtgatttctaaagcttatagaaacagaatgagtgtgagaagacaggtaacattttaccatcagtgcacttagaattttagaaataaattgactttgattatcagctacttcaactcttttgagtttccagctaaggaaaaatagattttgaaaaagcgacttactaaattcacacagccaattatcccattgccttttccactaaaccacacttctcaggcattgctgtgctgtttagctgcagaatgtaagacaagcttgtccaacctatggcccaggatggctttgaatgaagcccaacacaaattcataaactatcttaaaacattgagattttttgttttttaacaactggtaatcaatgtattaaaatagttgacttaagcatctgcagtggtgacttgcacctcaactcctggctcagtactgatggaagtaatttgcttaacaatctcagaaggactgtgcaagtcaattagttgcttgtggattctcctatggaaacattcctatgtcttagaaccttgaccacaagtttttcttgtagtgattctcaaagtcttggtaggcattcgaactgatcctttcactgagattcttttcctttgctcctctgatcaagtcagcacacatcttctccagggattttatgttgcagctcgttagagtgatttgaattcggtgaattgccacctccagctccatgggtgtttttccggtgtctttaaaagccttggctgcagcgggcttcctgaccgacttgttccttggcgagagagaacagcggtgagtcaggagcaggagcgggcaggagcgggcggaccgcagctccgcaccacctatgactgtgtcttcctcaaagagcaaaacattatatttttttgtgtgtgattattttatttttatttttttaggctcatcagctattgttagtgttagtgtattttatgtgtgactcaagacagttcttccaatgtggcccagggaagccaaaattggacaccccgatctattaataagatttcttgaattctgatttttgaggcagcaagtataatttgtctctaaaagctccaagtgtgtttgtgccagccaggaaatgactcaccttttgttgtattgttctagagttcatactggctaaaattagcccaagaaatatgtggcatagttcccaatgagttggataaaacaaaagatagtatataaggctgtttagctcaaggcttcattcttaaggctctctgatggcagcagttgaggtctctctgagcctgcagcctcagagaattttgaaagtaacatctaaaatgagtaggctgagttaatgaaatgtgagatcaccaggtagagttgttttgctcagattgcttaaattacccaatctttctgtggtgatttttgtctaaaatagcctacttagtaggcagtgtttgctcaaaaatcttatctcaaaaaatgagtttagtctcctgtttttctgctaaattttccctctcctgcagtaaataagctctgtgcacttgacttggaatttttctccatgttaactcactcttaggggctattatgtgttagaatctgagaatgctttaccaaagagctcttaagaggtcacctgttactggctctttttttttttttttttttccagacagggacagggtctcgctctgtcacccaggcatgaatacagctcatgcagcctcagcctcctggggtcaagtgatcctgccacctcagcctctcgagtagctgggaacacaggcacacaggctgcataccaccatgcctggctaatttttttttttttttttttttttgtagagatgtggtcttgccatgtttcccaaactggtcttgaactcctgggcttaggtgagcctcttgcctcagtttcccaaagacttaggatcacgggcatgagccatgacgcctggctgttaccagttctgaactagaagtgcagtatgcagatggctttggaaatgttgaggggtttttgggtagtaagcgactgggagataaatcattgaaatttagtgacattggcacagacactaaactttctgtaatgtgcagggaggtcctacacactatagaattaggtcacccaaaatgctgtctggctcctgttgacaaatactgagagcccaaccctttgctatttcataaggggaaatgaggattcaattgaagcttgccttataccacataactaattaggagtggagctaagcttgatagaacccagcctttatgtttcctagtttacagtgccctttatgatatacatggtgggtagaaaacctttctgaagacaaccactatttaaaaacatttttaaaagcgtatgtgtgtatatataatactattatttccactgcagtgctaattggataaaagctaagacaccaaggactttttaaagccaggtctagctgaaatagcagctgccatttttagtgagtttgaatatttgtagcacataataatgcatgagttaatttgatccagtgcaaagtatgtgacatatgtgcaagtcattcttaagactctccttaaagaatctgggacaaaaaacagaatttttcccaaaggagatgggaaaatttgaatctgtccacatgaggttgcggccacattgggattaactgaatctcataaaaggaccaccaaggtgaacaacttagggcttttaggccctgtatggcagtatgtcaccctctttctagacacacagaagtagcctttgaataatgtaaaactaaatgtaaacctaaaaaatgccaacatttggttgatgaaacctggagaagcttttcaataagaattcattagaagatgaacagttttattcaaacgaaggcatttaatgctatagtgaaaggaacctgtagccagaaaacttagattcaggctagttttacacttgagatcttaagttaacttcttcctttcatggaccttagtttccttatttattgcccatatgttattaaaaatgagagaatgtttgtgaatgtcatcaactgtaaaatcccttatgtatacaaggtattcttatttttctaggaaaagccagccaaagtaaaagtggaattggcttctggcgtctcttccaaaggctctgtggtgaaaagaaatcagcaacctgtcaccactgagcaaaattcctctaaggaaaatgcctccaaactgactctggagaattcggaagctgtaagccagctcctgaacgtagctcctcccagagaagtaggtgaggagagtgagtgggaggaagtgatcatctccgatgcccatgttttggttaaggaagctcccgggaattgtggtacagcagtcactaagacgccagtcgtcaaaagtggtgtgcagcctgaggtcactctggggacaactgacaatgacagtcctggagcagacgtaccaacaccatccgaggggacaagtacctccagtccactccctgctcctaaaaaacctacagggtaagtcagtgtgtttgtataatatagggctttggaaatgccccatgtttcttttatctcatgtctgtacagcatgcctgagagaggcagcagagaccaggcaatggttcctgttttagagatacagaaaccaaggcctagagatatataaagattgtcccttcccccggactctgctattcatgtactgctgtcagattacttacacatctcttcttgtcagtctccctaaagcattaattagagtcttgctggtataggctctgggcagtattaaaactatgagttaccagtcctggatactggatttggaaagagaatctttattaaagcatcctgtagaaagagttctggccttatagtcagagaactcagtactggttctgactgtttctggcttctgtttgactttgggcattgtcacttcatgtctcttcacctcagttctctcctctgaagaatcttgagttggatattagaaaatcttatcctcacaggctgactgtacaaactgaagattgtatataaaacatgcaaccaagtaccttgcaagtcggaggaagtcactatctttttctccccttttcctccttaaatgcttaattggattctgtgtatatcccttccctgaggaagttgtgttcttgtaactgaagacccttatttgtatcaatggttctcaactggtaacaattgtgcccgcaatgaacaccagaagccaattccacttttaactttggctggcttttcctggaaaaataagaataccttgtataccttgtatgcaaatatgtatgtgtgtgtgtgtatatatatttttcccattttttttttaacacaaatcatagcacaacatacatacttctacatcttgttttttatttttatgtttatttttattgtttgagacaggatctctctttgtcattcagtctggagtgcagtggtgcgaacacagctccctgaagcctcatcctcccaggctcaatcgatcttcccacctcagcctctggagtagctgggactacaggcacgcactaccacacctggctaatttttgtatttttttttttgtagagatggggttttgccatgttgcccagactggtcttgaactcctgggctcaggtgatccgcccgccttggcctcccaaatacatcttgcttttttttgggatggaatctcgctctgtcgcccaggctggagtggcgccatctcgtctcactgcaagctccgcctcccgggtccatgccattctcctgcctcagcctcccgagtagctgggactgcaggcacctgccaccacgcctggctaattttttgtatttttagtagagacggagtttcaccgtgttagccaggatggtcttgatctcctgaccttgtgatccacccgccttggcctcccaaagtgctgggattacaggcgtgagctaccgcgcccggccccatcttgctttttttaaaaaaaatcatgtagcaatatactttggcgatggttttgtatatttaaaggatgaagctgtgcactttagaccttttgtttgagacacgtaaatcactctagcaaatgtttattgaggcctcctctgtggtataggccatgtgctcaacattggtgctgcaaagatgaagcaaacatggactctgttctctagggtctctaagctgctgtcataagtatatgctctaactagaggtagattagatgttacagctataatagcgattggcattacacgctgtagacatcgttttacacttctgtgtcttcgcaatgaccccatactgtataggtaattactgttccattttacatattagaaacttgaagttaacagaagaatgaaattacttgtccagggccacacagctatttagtggttgaatttgaactcaatctgtctaaagcttgacagtttaaccccaatactatcctctaagaaagcactatgtagagattgcgctttggttttcttccctttgttccagaatttccagatttctcttcttattcttttcagagctgacctgcttacccctgggtccagagctccagagcttaaaggcagagcacggggcaagccctcattactggctgcagcaagacccatgagagcaattttgccagccccagttaacgtggggcgaggcagcagcatgggactgcccagggccaggcaggccttttccctgagtggtaagggctgggacatacctgggatggaggggctgtctgacaggaaagggacaggagtggggggttgagaacggacatagagacttggggagactctgaatgcacttaagtcaccagtttggctcctggttctctcagataagactccctctgtgaggacttgtggtctgaagccaagcacactgaagcagctgggccagcccattcaacagccatctggccctggtgaggtgaaggtaaggcccattttccagagtgggagctgtttgagggtctggctgcttccatgtaatgtatcaaagctataggtaaaggcacatcccatttcttacacgttggcagacctctgggtggaggttaacatgaatgatttatctgttttttaagtaatttcttaaaacttaagtgaatacatgtttttaaaccttttacttagaaataatttataacttagaaaaaagtcacaaaaataaaaatagtacagagaacacccatatactctttacccatagtgacctattgttaatgtattagcccattttgctttatcttttatgttcatgtgtgtccccccaccatatgtgggtgtgtacacattgcatgtgtgtaaaatacacattatagggtaagttatgcctttatgcttgtttgtgtatttcataagaatagggattttttttttttttggtggcagtgtctcactctgtcacccaggctggagtgcagtggcacaatcttggctcactgcaacctccacctcctgggttcaagtggttctcctgcctcagcctttcctgagtagctgggattacaggagcacaccaccacgcccggctaacttttgtattgttggtagatatggggtttcaccatgttggccaggctggccttgaactcctgacctcaagtgatccacccacctcggcctcccaaagtgctgggattacaggggtgagccaccacgcctggcctagaataggaatattcttttactgaaacattgatgtatacctttactctcccattcatattccaaattgtgtcaattcgacctgtgaaccctgaaaatctgagacaggtctcagttaatttagaaagcttattttgccaaaattgaggacatgcacctgggacacagcctcaggaggtcctgatgacatgtgcccaaggtggtcagagcacagtttggttttatacattctagggggacatcagtcaacatacacaagatgaacattggttcagtctggaaaggcaggacaactggaagcaaaggcaggaagactcaaagcagggaggggacttataggttataggtagataagagacaagtggttgcatccttctgagtttctgattagcatttccaaaggaggcagtcagatatgcatttatctcagtgagcagagggtgactttgaatagaatgggaggcaggttggccctaagcagttcccagcttgacttttccatttagcatagagatttgggggccccaagatttattttcttttcacagacccgattttatatatatatatatgtatatatatatatgtatgtgtgtgtatatatatatgtatatatatgtgtgtttgatatatatatgtatatatatgtatgtatgtgtgtgtgtgtgtgtgtgtgtgtgtgtgtgtgtgtatatatatatatatatatttttttttttttttttttcctccagaaacaaggtcttgctttgttgcccaggccggagtgcagtggtgcaatcatagctcactgcagcctcgaactcctgggctcaaggaatcctcccaactcagcctcctgagtagctgggtacacaggcaggcaccaccataccaagctaatttttaaattttttttgtagaaacggggtctcttgctatgttgcccaggctgatctcaaactcctggccttaagcgatcctcttccctcctcggcctcccaaagtactgggattacaggcattagccacctccccagtgtcttctttattttattgtatatttttaaagcccctcctattctagcacagttcctttatatagcatatttttctccagtctgtgatccagtctaggatcagatattaacgtttagttgtcatgtctctttagcttccttttaaaaatgaatgcatggttgtagaaaatatagaaaattcaggtaaaggagaaagaaaagtccctcatgatcctgccacccagaatgaccatccgatgtgctttcaggtcttttcctgaatttgtgtgtgtttattttttaatacagttttttaaaaatcagaaacttggctcttactccatatactagtttgtggcttatatttttcacttcatttagtgatacagatattaaaaattttctgtgtgtccaaattccatggattagtggggttggttggttggttttttggctatatgtagctagaatagttatcaagttttttttttttttttcatgtcaaatgggtaatgtgctgacgttataatgaggtttgagggaggcacatctcacccatgtgcatgaataccagattgtcatacttgtgagctataaaaggatctctcaaaatttcctaagttagcatttttcaagcttttgatcatgaccttcagtaacaggcatattttttattactgcccagtaaacatatatactaaaggtttaatgaagctgtgcccttactatatgcagtcactttttttttctcattcctatttgcaaaatcctggtttcaacccattaaattaatgttatgacccctcattggattgtgacctgtagtttgaaaactgtgtcatggaccaggttggaataggaaaacgggtctgccatctcccctgtcatgtgttctttgtcagttaacttcctttctttaacagttttacatttgccctgacaggaatatcaactggcttttactttgagaactgttttgttttccacacagatgtggcagctctgggtgtatgtgtgatcttgcggtgtagaaggaaggtatctggttagcgtcggtagttttgtatatttccagcccctagattcccttcatgtacactctgttacttgggtaaaccccagtcttctctgtaaatagtttccttttgattggtgacattgggtatttgttaaaagccacaagctcttttactagtcttaaaccagtaaagaggtacatgagatattcagaaaatcaacttaaattcattattatagaataattttaattttgtatgctttatcttttctttcttttttttagctatataagtaaaatatacattccttataaaacatttgaggccaggcatggtggctcttgcctgtaatcccagcactttgggaggctgaggtgggagcattgcttgagtccagcagttcaagaccagcctgggcaacatagtgagacccacatcgctaccaaaaaaaaagcaaattttgtagatagtggtaaagagggagaaacaaccatgattgtcctcttaccctgtgacattttagtgaatagtctttcagacatctttctatgcaaagttgttcaaccatgtatttatatgtataaaagctattatgtgcttttataactcagtagtagttgtaaatctgattcatggtgtttctaatacatggtattagaaactgcacagaagcatgtggcaaggcctggacttgaacatgacactcagcctttggtgggcttgtgactgccaactggcagtccagagggctcatttggagaatagctctacaaattccccgggaaagcattccctcaagtcgtttcaggacatgggagctcaggagtttggctaaggttcaaaagcactaaataatttgttctgatccacagctaccaagtggcccatccaacaggacttctcaggtgaaagttgtggaggtcaagcccgatatgtttcctccatataagtacagctgcactgtcacattggtaagtatgcagctaggtggtggtgggttgacatggaggttgttttgattttgtggttgaaggtcagtaggaggctgggggagagggtggtggtagctgggagggagaacagggtcaggtatagattgttaatgatgaagatcccatccctgatgcaaataatagctactggatgaatctgctgggttgttttggtctctttccaggtgagatttataaagtgtaggacagctgagattagtgtatttttattgagagttgccagagatgagaatctagtccagatttaacatttagctgtcttggaaccttttagcttagaaagggtgttccacagttacatttaggcaacgttgcctttttctccctaaaacagagtccagttcaacacgagtatcttaaagtaaaatagagaagtactttagtaaagcagcttattttgtttagcctagtgtttcccacagggttttccctttatttttaacataacacatattaacgtcctaatggacaaatgtgtgacattgggatcacccttttgtagggcaggcagcatagagcagggaaataaatgctagacagctgagagacctggtccaaaaggagttctggctctgctgctagcatgccatatgccactgggcaagattctttccttctgtggtcctcagtttcactatctgtaaagtgctgcattggtttagacatctttggggcatctgtcactctcaacattctctaattctgttgatgcttaaagtatcaaccagcaagatgtcttttggcagtttctctagctgatttgattaagatgaacagattttgagagaacagctagatttttaaaaagtcttgcctcataatggcagacaggttcagaaagggtcattcattccttcaaaaaatatttattgagcacatattctgtactaggatctgtactggggattcagtagcaaacaagacagcacaatgtgatgggttaatgtctggcctgacctgatccataaggagaatgtgtctcttatcctggagatctgctcaggtttctttctcttgtgacctaaatataatcactaccttttccatgccttcactcaccactccctttggctacaggaggcaactagatttaccatttagggggaactacccctgagtagaccctctcttctgctgattagatagtaacttgtcataggagcttagatgctagagctttgagctttaatagtctgtaagtcacagtttgtcttcaggcagggcttgaactctttagttcaccagtctcaagcactctttgtttaaacagacctgctttactccaccaactgcctggaccctgaaggcatttgagtttctgaccattgagagtcaactctcctgtttcacagatagggaaggactggactggatttgccaaaaatttacagcctgtattaaaagtaaaagagttaactgcagaaaaggttaaggctcttgaagttaggctgaatctggtttgcagttgccactctcttctctgatttactggcagctgctcattctggttctgggttctgcccaggtttaacttaatttttgtagaattgaacactggtcttacttttttaggatttgggcctggctacatcaagaggccggggaaagtgcaagaatccctcttgtagctatgtctacaccaacaggcacaaacctcgaatttgtcccagctgtggtgttaaccttgccaaagaccggactgagaaaaccaccaaggctatcgtgagttccttcccccaaacacatcccctggcctgttctgggctctgttagtgaacctgtcttagtagaaataagaagatttttaaagtacatggtggtagttagagcatccaaactgaaccagttggtgggttctgaacctgagcaagtgccgccttttctctgagcctccttgtccccattgccagggtgaaggggttgactaggtatcttgatctctgagaaccaagagttcactcactgcagagaatgatgtagcacaggccttaagtaggagtgaaaggagagggacgaaagggttgcatcctcttaccgctgaggcctgatacaagacctgtaagttgatttactgtttcggtaaatagagaatgccaacctgagactttgcagattagaccaccgctgctttctcaggctccttggaaagcttttagttaatcaaagctttatttctagcagtctaggcagccctcctctctgaagttgggccaaactacttgggtagtaaaatacattccacttggctccttagggctgctattattattattactattaccaggaaaaatgggcattttcagaggtccccagaatttccatatgagttttttaaagtgaacagaaaatggtggcacttgaggcagcaaatggaaggactaaaataaggatgagaagagaaatgtcactggtctgccttggggaaagaggggatggcacacagaacaggtcaggacctgagatggagcctggtcactccagatcaaggctggaccttgaaaggcaggcaggttttgaatggaaggggaaggcatgccatacttaagtctctcccactagactgtagtctggtgagtgaacatgaagtgtgagtatggataaggataagtgtgagtgataaggataagtgtgagtgaacatgaagagtgttccatttggctggaggagatggcgtgggggcatggggtgggagaaggggtgttacggaaaataagacgtgaaaagcatcttggaaccatgtcatggaaggtcttgtcagtttgttctttagtcagtggggtcctactgaatgtccttgagccggggagaggcctagaggaaagttatttcaagaggggaatttatgggatgagagtttgggagtagacaggactacagaggtggggagaactgcttcaagcttagaggtttatttgtatatggagagaggcctttttgatgatgaatctcaccctggtctccagagtctgtttccgtgcttgaggtgatgttctgaggttattgtccttgtgagaaaggaaagtggaaccaaagtatgtgggcactaatggcttggtgggaaaaacactggggctgggagtgaccctgagttggaagcttccctctcccgagctttagtttctccattggtaaagtaaggtgggcaaggtagattagatctgggcattttactcttaagagacaggagccttagagaagactgataattgagttttaaggagtttataaatccctgaaattgcatgcaaaatgggtccgtagctttcatcagattctcttgctccactggatgcctgctgctggaagtaagctttcttcccggattttcagtgggtttcaaagtgctcttcttgccatagcattgatcacaccccatattgactgcttttcttaactccctatgagaccacaatctcttctagggcaggtatgtctgtttttcctgcaccttctaaccctggagcttacatatacaaagtgtgtctatctgtaattaggagatagaattgagttctgtgtaggtagaagctctgagcattcctttctccttccagttcattttagctatttgcgcggtttgcagtggaagtgggtgttactctctagatctaggatgatgaaggaacttaacttctcaggtgacataggaaattatctagggacctcttgccaatttcaaatcccactcttaaacttatatccatctgtatttggttaactgagaactgcccacccccaggaccctcatctgcagaccttccatcactttccaatctcctaaagtttggagaaatacagtgtaattactgctttccagaaaataaagcactggtcagaaccacagggatcttcttgtgtgttgtcatttggagccccctggtagccagatgttttcacatctctgagatggaatggtctttagtcctttctatccttcatctctggcgagagtcacgggacagtattcctgccaagtggtcttccagctgtggtttcatagtcatgactgagaacacacagcctctcggggcagctcattctagtgttagtcagctcttctgtagccactgattaattaattctctcagccagcctatattgaatgcctgctatgggccaggctttcagagatgaataggacgtggccctttcccttgaagagcttacagtctagtgggagagaaagataaccaagctattacaaatgaaagttgtcataggtatgcggagttaataaaaagctccttattaagtgtcctagtctgttttgtgttgctataaaagaatacctgaggctaggcaatttataaagcaaagaggtttatgtggctcataatttggcagtctgtacaagaaccatagtaccaacatcttttttggtgagggcctcagactgcctccactcatggtggaaggcaaggggagccagcatgcatagagatcacatacagaaaaaggaagcgaaactcattcaccacctcccttgctcctgccccacgataatctactcatgagggatctgcccccctgacccaagtacctccctttaggacctgcctccaacgttggggatcacatttcaacatgagatttggagacggtaaacatccaaactatagcattaagcatttaacttctacagagccatgtataatatgtccatcacatatgaatcagtatcttatgtgtgtctcaggcatcatgctggttgggaatcagtaaataagcagaatcctacccttactgaagcggggagggtggtggtttagcagctgtcagatgatgaattctgcagtcaaggggtgcactcagagaacacaaagcggggagtgatttatgctgccttggcaaaaaggatcagggagaagctccattgaagagagacctgcttgagaaagacctatttttaatgagtatttcagaacattgttcctggaagcctctgactggtatacaaaattaccttgtacccagaagccaccgagaattaaagacagataactttaagcagtgcagatacttgtttatgtatcaaaactatcattcatagagccttcattgcaccataggcattgtgctaagtgctttacttataatatcttacttaatctgtataatggctctaagagattactatttttatgccccatttcacagatgaggaaattgagactcagaaagattaagtaaattgccttgggtcccacatacacagctgttaagtggcatatccagaactgaaacctgggtctgttatcctctaaaccccatacctgatgaatgagagctaagtgttgaatccattaccaagagttgtatataatcctctcatttactgatacaggttgactatcctgtatctgaagtgcttgataccagaagtgttttggattatttcataatttgcaatatttgcagaatacatactgcttgagcatccctaatccagtgattcaaaatctgagatgtctaatgagcatatcccttgaatgttgtctcagtggtcaaaaaatttcagatttcagagcattttggattggggtgctcaacctgtagagaaactgagccccacagagaaaaataaccagcctttagtcacacagtgagttattagctgagctggttaggaacctaggtttgccacctatcagtcatgggccccatctgtctgctgctcccagacttttattattttagcctgaagctggctctttctgctctgagtgcttggtgatcaatccactctcttcccaggaggtgagctcaccactcccagatgtactgaatgccacagagcccctgagcacagcccagagggagatccagcgccagtccacactgcagctgctgcgcaaagtcctgcagattcctgagaatgagtcagagctggctgaggtcttcgccttgattcatgaactcaacagctctcgacttatcttgtccaacgtgagtgaggagacagtcaccatcgagcaaacctcttggtcgaattattatgagtctccgtccacgcagtgccttctctgtagcagcccattattcaaagggggacaaaagtaagcaccccttaactctgcccctagctaccccatcccatttggctcatactgctcttttcttcagaaaacattaaaactataactgtgaagatgttattctctgccgtttttaggcttcctttaactttctgattgctgaaagtaaagtaataattggtaattatcatttctgttgaaatgcctgaaagttatcaccagattaggatttagtttacatctggactgccccacacaatgtttaggtttgggagttcattgggattggttaaattatgtaataaattcagagttacattaattgtagggatgattccacagattccaacaaagtggaaatacctacctagaaaatcctaagctccagcaaatgagaatttgccattgatcactgagccctggaactccataaagaagtctctttcccttctttttttttgttggtgatgtttctggtactagctccctggctgggccccaggagtgctggctgctgacagccagccgtctgcagacagtgactgcccaggtgaagatgtgtctgaacccccattgtctggccctgcacagcttcatagacatctacacaggtgggtgccaaccttctcttccctcagagcatcccaaagcaggcttgggaactgcctctatggatgagacctctggccctttgaggactgggccttctcagatggggcttctgaggaagggggagtcttcttcctaaatgtcttagtcccacaagatgacttttacctctcaagtgttgaagctctcaactgggatctttaaaataacagatcttcattgtggaagggctggaaaatgcagacaaataaaaagaggaaacaaaaaatcaagagcattgctactgccatgagataaacacttatttaacagtgtgatcaatcttccagaaatgtttattcatctgtgcagaatataagaaattataggatgtataggtttatagtctttctttgaacaaaagtacggttgtgctagatgttgttttggaatgtgctttttaaacttaggggtacattgtgggcatcttcctgtgccagcaagtagagaagtacatgaccatttttatagggatgtatggtgctccagtttacacttttgtgattcagtctttgtgtacagccctaatttgtcttttggacaaatactcagaagtggaattgctgcacatttaccctttcctcccctattattcatcaacatcaggcatttgtggaacactcaccgtgtaccagccattttaagactttggttgaatcctaagttttgtttgtagaattgagtgctgaagatgaaagtgtatttttgatgtattctctttgtcttagaacttaatggtgctttattttgaattcatgtttttaatgtcttatattattagattgagtttgtactattttatgctcttgccaacagttaacaaaagtgcctattaccctgttgtctatccaggctagtactcaggattatatatttatttagtcaacatgtattttaaaatttacatgtagttaagtgtgttgctccaagttccataagttctgacagatgcactaagtggtgtaactaccttcacaatcaatatatagaacaggtctatcacccaaaacattctcttttactgttcctttgtatttaaacccatccctctcccccaacctctggtaactgtttgatctcatctttatccatatagtgttctctttcccagaatgtcatgtgaaagcaattatggcacgtagccttttgagtctggcttctttcagtaagttaatcctttgagagtcatccatattgtgtttatcagtgatttattcctttttattgtggagtagttttctgtggtgtggatgtaccacaggttgtttagctgttccccatgggaggatatttggtttgctaccggtgtttggcagttacaaatagagctgctacaaatatttgtgtaccagcttttgtgtgaacctaagttttcatttctcttgggtaaatacctaggagtcagattgctgggtcatgtggtaagtgtgtgtttaattttataagaaaactgcattaccaaagtggctgtaccattttgcattccttcccacaatgggtaaaagttacagtttgctctacatgccagtacttagcattatctgtttttgtttttcagccattctaataggtgtgtctccgtataaactgtagagtcagcttgtcaatatctacaaagtcctgcttgaattttaattggattgtgttcaatctgtacacatcaatttgggaaattttgacatgcctaacaatgttgaatcttccagtccatagtctttctctccattttaataggttgtcagtttttctagtttcagcatataggtcctgcccatattttggtagacttacatataagtattttacttttttttttcagtgctaaatgacatggttcaatttctagctattcattgctagtatagaagtataattaagtttgtctgttgactttgtttttgtaaatattataatttttttaagtttatcaattttataggtaaaaacttgtgtataatcaggtaatttgttgtatttctttgtagtaggtagagtatatgtcctttttatgatcctttatgggtttttttctatagtaaatttcttttgtgttttcattcttcttttggtcttttttgttgacagttttctcccagtttatcgctctatttattcagttttacctctagcctgtcagaatgtgatatcagttgtcttttacatttgtacctggtgatttctgggggcgtcatgacttttgctttttaaaaaatatttgtatgggaccagagctttgctctcccttgtggtttcagcctttgcacttctccttacccttcttcactgggaacacatactccaaaatttgcttttgtgcagattagtgcattatgttttgtgcacatataaaatcacccacttttatttgtcttaaattgactgcgcttaaattcctcagattcattcatttcaggatttggtgttggagtgatttcatagcctttgttgtaccccttacacattcatgagctaaaggatgctcctggcctttccccaggtgaagttgtgtgaggtgtaaaggaagagtgatacctttggtcctgaggactgagctgggtgggaagaaagtgttccttttttttattgggggaaaaagatctactatatgtactatttcattattttttgtttgtttgtttaatgatgtattataggcaactttgcgtcagaacagttagatctacttctttttaaaaaaaaatggattccatgttggaatactttattctttttaatgctttctattttatgaattcaccataaattaattaaccctttccctattgatgggcatttagttgtggggtttttgttttgcctttttcaagatatataacttgaataaaatagagatggggctttgctatgttgtccaggctggtcttgaactcctgggctcaagcgatcctcccaccttgggagactacaggtctcccaaagtgctgagactacaggcatgagattacaggccatacctggcctgttttgtttttttgagatggagtctctcactgtgttacccaagctagtcgacaactcctgggctcaagcgatcctcctgcctcatcctcccaagtgcctgcaactacaggcacgtgccaccgcacccagctggtgtgtattctattttttgccattgtgtatgatacattaatttccttgttgcctcttcttaacctgcaggtctctttaatgtggggaacaagctgctggtaagcctggacttgctttttgcaatcagaaatcagatcaagctcggagaggaccccagagtgtccatcaatgttgttctgaagtcggtgcaggagcagacaggtaaaagttgttttcttccctttcccaaggttagtcctaagctccctcggaattttcagtgatggcatttggttaaaagactcattttgaagaagagtctgattattttgaaaaggagacattcttgacttcctaatacactcttccttttgaattttacaaatgccaaactaattttggaaagcatgaatctttttgtgcatccagggacccttagcaagagattacgagtgacttgtagaagtaccttctttggtcatagggagacttggccccattgcatgttagactcattctgaccacacagctcctggatatctgcttccagtcccaaggctcatgccaagacctaagagtgaggaccatcctttctgtctagaatatttttcctccatgccctctttactcctatttgtgcttttcccatcccattcctataggctccaatccccctctaccttacctgctgtgagaacagatggagtagagcctactagagttacatgggcctgtgtttcagtcttggctctgccactgttgcagtgtgattttgagcaagttattcttgtgcctctgtttctccagttataaaatgaggataatagctcctcgttcataaagaattaaattgaggtgagattaatgacataacatatccaaagctttcagcacagcatctagtacttagtacaaggcagctatcactccagtgggaattgctctttgggttgccacctgagcacttgcaggccagatccctgaccctcagggtaggtagtacactggagtgttctttaaggtgaatcagtctggcagaattgctctacttactacccactggctcatccctagtggcttcagtgtctttttctgtgcccttctcagtgttcttgctcttctttcagagaagactctgacctcggaggagctgagccagctgcaggagctgctgtgcaatggctattgggcctttgagtgcctcactgtccgagactacaatgacatgatctgtggcatctgtggtgtggcccccaaagtggaaatggctcagaggagtgaagagaatgtgctagcactgaagagcgtggaggtaagtgcctcttagccaccgtgagggacctgcggaattttctcattttggcacctcccttcctatatgatatccccagggggtggatagctccagtcctgtctaggtgaggcaagtgagtttttcctcccacagcccaagatttcatttagggaatgccagatggaaatggaggcatttgtttattcagttactcacttgaaaaatgtatttatccagtgaataagtatcaaaaaatatatatagtaaatatattgaacataaactaaatgcatgttttagacacctgggagatagtagttaaacaaagtttctgtcctcatggagctcactttctggtttggaggacacaggaaacaaatatctgtccaggagtagtgagtgctgtgaagcacagtaaagctgggtaagagagagagaacagtgtcatgggaaagggcatttgtattttatagagggcagtgaggggggaaggcccctctgatacagtagcatttgagtagagatctgaaacccatgtggctttgtggaggaatattccaggcagagggaacagctcgaacagggtctgaggaaggcttgctgggtatgattgaggaccagcaaggagaccagtggtgcagctcagagtgtgggagggagggagggagtggtggggtgtatgaggtccagacagtgcaggaggccgacgctatgtagggtaacatgggctattttaaggacttacacagagtgaaatggagagccactgaaggggttggaggaaaagagtgacctgagctaacttaggttctgaactgaaaaattttcacacaataataacatcaaactcagatggcttcatagattaattagaacaaatatccaagaaatattattccaaacataggcaagtaacaaaagtgggcatgtttccccaactcatcatataaggttgtataactttggaaaccaaatcagacatttgatgtaagagaagaaattggggctgaatatactcatgaatatagatgaaagtctgaataaaataatagcaaatcagatctaacacagtaatgcatcatgacaaagttaaacacaggaaagcaaggttgtttcagcagtaggaaatatgttaatgtaattcactacttaaccgattaaaggggaaaccctatatgataatttcattaaatgtatggggaaaaaaaagttgtccagtatgattctacacccatatttatgataaaacttttagcaaacagaacagtaggaaatcttccttaaccttctttagggtttaaaaaaaaatcccatagattacttttccctgtgatcatgctatgaggtctggtctacactcacaggcagggactgcgccttgaatatgccagtagttgcataggagtgtgaggtttccatctctgaactctaccatagtaaacaagagcctgggacatgagctgactttcaggtactggacttgcatctcatgtgttcactgatcaggcaggtgcagaacctgtagagaacagctttggtgtattctggcaggaccactagacatattaagggttgaatgcatagtcctgtcttttacttcccaagtaagaaaccaggcaactaaaccattttgtttgtgttatctcatctagaggctgtttccagattgattcaaatccgcttgcctagtagtagtgttaataataatgcagctaagatttattgagcattttattactatgccaagttcttaatctgtgctaagtgctttactatatgacttaattttccctacaaccccatgaggtttttatagacataggcactgaagcccaagggccttgcccaagctcacccagccagagaagggtggggctgagattgaccttgctctttctcagccgctgactgtggagtctgcaccctaagcactgccattctcaccagtacctcctacgactctgagttctgtttcttctgatcatatctggccacagcaagtttatggtttccaagaatagacagaggcccacctccctgcaaaggtgccatctcctagtcctgcctggcacccgtcctgtcccaatcaaggctcctctgtcccagaatggagtagcattcccttcactctcagtttgcttgtctctttccttcagtggtaccaggtacttctttcatagaggtacttctttgttttgtgtgtggagagtagtgtggtatgtgtggggagagagtatcctgaagtctgtgaactaaaacaggaagttattgaacaaaacttaaatatgctgttatccatgaagagacttgtcagcccctctctcggagttgtataaaggaggaccctgtggttagtttgtgtactgggttggcatttcctgttcccttgctccttgtggagaggatagactcagctggcctcattcccctaggtgtgccatttacacagagcatgcactaagcacccctgtgaggtggcaaacaaagaggaataaggtgaggagaggagcctttatggggagcagtggttcttggactttagtgggtataagaactacatagggcagtggttctcacaactttttacagtggagggcttgctgggtcccacccacaggatttctgactcaggagatctggagtggggccaggaatttgcatttctaacaagttgtcagatgatactcttgctgcttgtccaggaccaccctttgagaaccattcctctgaggaaacttttttaaatgcaaaattaggagtttagttcatacagctcaagatgtggccaaggtttttacatttctaataagtaagctatacaactgtgattgaggtattaggatccgggtcacgttttgagagccatataagagggcattgcaagaagaaaaattgagtagcacaagcgctattaatagatgtctataagagataagtaaatgctgccctgggtagaggagatagctgtgtgctgatgatgtgtgggaggatgtcggcaatccacagggccttggaaaatggctggaattttactcaataggattctgctcgttcttgccagcctggtatcagcagtaagggtttgggctttggaactagacctgtgttgacgtgattgttctgtctcttcgagtgcttgaatactcacctcagccatccccagacttgttttttagtagttcattacaaagtgtctggcacataacaggtactcaaatggtagctccactttctttgtaagacagggaaaatgacataaacaaaggtatagaaacagaagggatttaggaactattcatgtctgggagagtactatggtgtgagggaaagaaatgtgaccaaaaggcaggtgggtacagagctgtcaaattcaaggccctgtggcagtgcctggctgtctgacttcccttcaccaagccttggcttccctgtgtgtataatgacggggtaggctgttgtgttgctgatgttctgtgactcccacagtttgaccttctttatcctgaccttctagttcacctggcctgaattcctgggctctaatgaggtaaatgtggaggacttttgggccacgatggagacagaggtgattgagcaggtggcatttcctgccagcatccctatcaccaaatttgatgcgtctgttattgcccccttcttcccaccactcatgagaggagctgtggtcgtcaacactgagaaagacaaaaacctggatgtgcagccagtacctggtaaggccacctggtggctgactggggtcaaaaaagggctcagtcaagagtctgggacattgtccatggcaagatagcacagtggtagcgagagggccaggccccgctgcaggactcctttcagaaagataataacagcccgtgtcaaaatcccctagagtttaaagttgtggtgcagagttttgaagagctgtcctccatcttacatagcaggggcgcacagctcattgtcagccttctgggatacacacactgagtagcagaactcctataaaaaatgctgataaggctccatccccaaaggttttcattgagcaagtgtaggggcaggccaaggaatctgccttcaaaacaggcctcccagagggttttgcagctagttttatggattagacattgagaaaccctggactagcgggtaagaggataggtttctaacagcttgagtttgattcccagctttgccacttagctgtgtgaccctctgtcaggtcccatcattgccctaagccactgttgcttcttttacaaagagggtgcgataatagctacccacttcctagatcactgaagataaagtgagctaatgcggttagagtgatagccgccttttttaactgtaacccatagtgagaaatacattttgtgtcatgacgcagaatgatattcgtacatatgcaagtgtgtataactgaaacaacattcccaaaacagtatttttctttattttctatcttatttcatttttgaatttttggatatgacccactcaattgatattgtaatcacttaatatgttgtgatccactggttctcaaacagtgcttcctaatattagatattgaggctgggcacggtggctcacgcctgtaatcccagcactttgggaggcccaggcgggcggatcacgaggtcaggagatcgagaccatcctggctaacacggtgaaacaccatctctactaaaaacacaaaaaattagccgggcatggtggcgggcgcctgtagtcccagctactcaggaggctgaggcaggagaatggcgtgaacccgggaggcggagattgcagtgagccgagatcgcgccactgcactccagcctgggcgacagagcgagactccgtctcaaaataaataaataaataaaaataaaaagatactgaggtccacctcatattcctgctaatattttaagggcccaggcatcttttttttttttgagacggagtcctgctctgttgcccaggctggagtgcagtgttgtgatctgggctcactgcaactctgccttccgggttcaagcagttctcctgtctcagcctcccaagttgctgagactataggcgcacgccaccacaccaccacacctggctaattttttgtatttttagaagagatggggtttcaccatattggtcaggctggtcttgaacttctgacctcagataatccacctgcctcggcctcctaaagtgctaggattacaggtgtgagccactgcacccggcccccagggattatttttttaaggtgcccccacatagttctcttgtgctagccaggttcaggaacgttgtgtagagggcacttttaaaccgagagctgctgttcttttcttattgatgcagtcatggtaagcatctgaggtcttggttctgaaaaaccttagaagactggattaaaagctgacttattttagggtttttttcagtggcggtatgcaggatatctcactcagatgttccagggcagaaagccagttgtaatagacttcaaatatctgcagaaagcgtggacctgacttgagttccacctctgccagcactgggggagggcttggtgcagagctggcttccactgtttgctgttttgtgggcctagccttggcctctggtgactggcggcagcaccctcccaccagcactgttgtctcttgcaggcagtggcagtgccttggtgaggctgctccaggagggcacctgcaagcttgatgagattggctcctacagtgaagagaagctgcagcacctgctaaggcagtgtggaatcccctttggggcagaagactccaaggtgagtgtcaagggcagtggtggatatcggggcttctggagtaggctgattggtccactttttaggtcagggatatgaatatctgtgatggcatctgccttggacacaaggtgctggcagtcagggatgcctaggagatggtcaacagctagatgtgacatgtatgtggggcctggcctctaacagttcctcctgttgaaggttgtgagcctaggctctggggtcaggaatcctggctctcctccttactgtgtgtgaccttggataagctgctttatattttgagcttcattttccttgtttgtaaaatggaaataaccaaaatactaaccttgtgagattgttgtaaggaatgcactttacacagtgtctggttactacctatgcaagctcttagaaaatgcctactgttacatagtgtatgtgtctatgtgttttattcatacattatttactttccctttcatatttctgtgctgttgaaaatgttatgcttccttcaagatcagattcaaatgttagctcccctttgatggtttctttgccctgtaaaaagtgaaaggactcaggcctcagagtctggcagcttgatcagcagtctggctggctttgtctgtgacctaatcctttcagggcctccgattgcttacctgtacctagaggaggttgggctgatgaggctccaaggcccgctctgacccaggcagtttattcttttgctttgggtgttgggtgagtgtgtgatgctgagcaccagccgtggtcccttagcattcgcccttatgtttttaatcttgtccttctactccaggaccagctctgcttctccttgttggccctctacgaatctgtacagaatggagctagagctatacggcccccacgtcacttcacaggtggtaaaatctacaaggtgtgcccccatcaggtaagaaaataactagggggagcttggagtgaatttgctaatgttgaacttcccatacagggactgatccagctcagttttggggggctagacttaggtcactgggcaacctccggcatagctgcccacgggtcaggtgctaccccctgggctagggagggaggctgggtcttctgtcagtattttttaagcaccctaccacatcctgggcatcagctgttgagggtataagggcgagcttgtataaagaatgacaaagatgtcgttcctccctagttgaccgtatattttagtggggaaataaagtcaccacagcttgtggcattggctctgaagaaattagataagggcctaagatagaaagtaacagggaggaacctgctgtctgaggtggcagagaagactgagacctgcaggatagggaggagcccattggtaagccagggaaggagtgtcacagccaagggaccaccaaggccgtgagtggggagacagagtgagctgagaggagggggtgttggagggctcccccggggggccagatcacatagagctctctaggccagagtaacagttcgtattttattctgactgatgagggaccttttggatggttttgaatgggaaatctgtggaagggtatggacaaggtggcactgggttagctccaggacaggttatgtactagatgacagagtgggcccaggtagatcttggaacggaaacccccccccttaacaggtactgaatgggagagaggtggcttatcagagccttcactgaagcacatgagtcagcagggggatctagctgtaaaaagagaatccagttcccaactactttaacagaagctgtgtctgaaggagatgcttaatgcttctactctgggcagatcagagcctgctcagggaattgtgttcatgcgacaggggatcatctcatgagaagcagctgacagcacggggagagctgtagatcttgggggctgtgatgggagtggcatcacttggaggtgacagccaagtgggtgtacccagagttgtggaatggtgcttggggggccctgtcagtggaggtgtttactaggctacattgtggattcccatctgggcaacaagcccactggggtctggtggggagcttgctcaaaatacagatgcttagaccctacttcagagaccttagtttcttaggtttgacctcgggcccaggcatctccattcttaaccagctcttagctgctgctgctgctatgtagctagcatagtgaactggtaggtgatgtggagagagtggggttttgaaagatgttctgaggtgcctttcagcctaagttgaggacaggatgctcccagctgtctctcagaagggcaaggatgagctggtgacttcatttaaggacagaagtaggaagggagcagcatgccatgggctctggcaggatggccatggcttcggccctgaagctgattgctcatcttcctgggaagaagcgagtgagaactgtacactctctgcagactggcttcctaattaaccctgcgccccccacccttcatctcccaggtggtctgcggctccaagtatcttgtgcgaggtgagagtgcccgtgaccatgtggacctgcttgcctcttcccgccactggccgcctgtctatgtggtagatatggccacgtcagtggccctgtgtgctgacctctgctacccagagctgactaaccagatgtgggggaggaaccagggctgtttctctagccccacagagccacctgtggtgagtcacctcctgaggaactgccatgtctcctcaagcctaccatgtcttgctctgtcacccaggctggagtgcagtggtgttatctcggctcactgcaacctctgcctcccaggttcaagcagttctcgtgcctcagcctcccgagtagctgggattacaggcacacaccaccacacctggctaatttttgtgttttagtagagatggggtttggccattttgcccaggccgttctcaaactcctgggctcaagcaatccacatgcctcagcctgtcaaagtgctgggattacaggcatgagccaccacgcccagcctactccgtaagtttttactgaccaagccctctgtttgaggccacagtatatcacttagtgtgcccaggatatcccaaaccttgtgttaaaagaggttgccttccagagaagcctagaaagttgccacctttgagagttattgtgcacactgacatattaaaggccccagccagccctggattagtttaattcaccatgtcttacatttagttgaccatggataacactgtatggcatgcctgttgtgatctgaagatacactggtttagaaaacactcatcttatccaaccctctccttttattaaaaggggaagctaaggcccagaggaggaaatggacttttccgggtcccacagcagattagtggcagagcccttgtctctgtgtcttggtatattgtaccagacagtatttctcaccagtcatgtaccctccaaggccagcaggccagcctttggcctttgctgaaatagatgtcagaactgataattaggaagaagggaagaataacaaaggttgagtgccccagccaggatgcattataggaagtgaaggcctctggctttgccttggaggagtcattattgtcattactccctggggctcactggctccatgagcatgctggggactccagaaaagtgtcttaacctcagtcagagcctgatctttctgctcccctgcagccactggcctgaatggaccgggggcaataatagcataagtaatccaacatctgttctggaaggtggccactgttactgtccctgttctcacatgaggaaatggaggcactggcgggcaggggttggcctaggagacacagtacatggtgatgttaggattcaaagagggctggctgagcctagagtgttctcgtcaccagatgggttccaccttagtcattccttcttatcaaaatgcattctcatttctcttctagagtgtgtcctgcccagagctcttggaccagcattatactgtggacatgacagaaactgagcactctatccagcacccagtcaccaagactgccacgcggcgcatcgtccatgcaggcctacagcccaatcctggtgaccccagtgctgggcaccactccttggccctgtgccctgaattggcaccttacgcaaccatcctggcctccatcgtggacagcaaaccaaacggtgtccgccagcggcccattgccttcgacaatgccactcactattacctctacaaccgcctcatggacttcctcaccagccgcgaaattgtcaatcgtcagatccatgacattgtacagagctgccagcctggtgaggtggtcattcgtgacaccctctaccgccttggggttgctcagatcaagacagagacagaggaggagggtgaggaagaggaggtggccgcagtggcagaataagccaggctgttgtacagggactacaccatctctcaagccatagtaaggcccttgcctgaggcagagctatccaggggacctgcagaagtggtctcctgtggggagggcctctgactgctgggactgaccaaagagcttccattccctgagcatggtgggacccagggtcctcagttctcaaccctccaggggtcaggagtggtaccaggaaacctcttctggccccgagagagcacttgggggacacggtatgtttaatggaggggaggctgagggaaaggctcgtagctggtgggttccgtggggcctgcggtgtgggtcagggtggaggtcctgggtgggctaaggcgtgagccccagcactaggtgggaaggctgctgaggtctctcccacccctgaggagccctggtttcagccccctcagtctgatgaattgcttagcctgttgcctttgactaggggcctgggtggcctcattaactctaggggtccctttgggctcttgattctccctgaaggagggatgcatttctctcttgctcttcctgtacccacatttgggggaagctgaggagggaggaacagtcagccacagctctcttccagcactgtcctctccaccccaagctttgaggaagagcatccccttcctcctttccctggccactgctgctgcagccaatatcctctctgggcctgggaccctctccacagaggggatgtggtccctggtcatgacataacctagcagcagtaggaaaaactcccttctatgaaggggaagcagactgggccataaggaaacagcaggactggctcaagtgcccaaggtttgtttagggcctgggaattggccatgtgttaatttattgagtggagtaggtggctttttttccctccctcttcccccaacaagaataaagtttattaaattatctggttttggtgtagcaggagtcaattccgtgcacatcgtatggggcacagtgtggtcaagctccacagctgtgagctcgtcacttcatgtgaaggagggaaggaaagaaagacgttccagggaatttgcaggtactcatgtggcacaaagaaccagaggctgactgcattaatgctgttagtttaatgtggacagagacatcccacggcgtgactgttagttaggatgagtcagcttgggggagtttgtgcttcctgcttggtgtggccagccacatgccaaggtcccctgccttctagcccagaatgacgggactgggcagaacacccccaacttttagctgccacttggctcattacagcagtaccagtatgggggtgggaggggtgaggctgtggagtgaaggcggcgtatagggcagagactaagaggtcctgtgagattcttagaggagccatcctgctccaaggggcctgagctgagtgtggtctgtgagcatctgctgctcctctcagagagggagatctcactctctgccagtctgtctagccccaaagagcctggttttctcagtatcagtgtagctcctggggacttcataggcataaagtcagtccatttccatgaagataaggggattaggaaagaaggttctactagttggcatagcaaacacgaggccaacaccatgagaacagtaggggaggggggggtgagggctcagcccccagcccctgactggcagtgatggcccatgctcaggaagtgggatcctctgacctcccctgaatccctcaccttcccaagtttcagagctgggccgagctgttgagtgaaatgaccgaaggcagagtttgtatgttctccccgtgtcgccccatccatggaggagttgaagtttgtgggaggggagagtggtactccctgtcgtcaactcctcagcagaactgatagttgttgggctgcagcaagggctgggcgatatccccttgctcgcagcaggtcaggtgctcactagagctctcctcctccagctcactgctgctgctgccgctgccaccgcttctgctgctgctcggcagattggtatagtcctgagggtgggagggaccagaaactgtcagtccagatccatcaggcccagcccaacgtgctttaccggccacccaccccaagcctcaccccactcacccgctctctcctgtcctcttgggcctgctcctgaaggaaggagcagatctgctggaaggtgggtctgtgggtgggctccaaggcccagcaggcctgcatgatgctgtatctgggagataggacagaggatgcccatgggcagctccctagggtccaggggccattaacacacacccctagagagacctacccagcagaggtccccaaacccagtcaaagtaagtttagtataaaacctatgccaagtccttggcatgctttaccatttaatcctcacagtaacccttgcagaagggtactctcatcaccctcattctgacagatgaggccattttggtatcctcagggtaactgtaataacgatctcttaaaagtctgtttagggacaggtgcagtggctcattcctgtaatcccaacactttgggaggttgatgcaggaggattgcataaggccaggagttccagaccagcctggacaacatagtgagatcccatctctactaaaaaattttttaaaaatagctgggcttggtggtgcacacctgtagtcccagctgtttgggaggctgaggccaaaggattgcttgagccctgaagattgaggctgcagtgagctatgattgcacacatcactgcgctccagcccgggctacagagcaagatgctgtctcaaaaaaaaaaaaaaaaaaaaaggaaaagtggtcggttaggaccagccctagtgaacagctgcttctctgagaacatcccccatagcttgaactcaaaaggggcttgttgtgtccactatgggagagataaagtctgaccctggaacattttggacagggaaagatcagggccacacggccttccatccctttccagcgaaagcctggggtgtccttttccctccctgggatcccttcgcttacatattctttggggcaaatgcaggctgggccatttggtatccatccttcaccagtttatagaacttgctgttcaccaggatgccagggtagggattcagccctgcaaaggccaagatcaggtaagaggccatgcccattgtcttctccccattcccgcacacccacacacatcttagactgggtttaaagggtcccacttgacaacactgcaacagcagctactcttacccggtgcttcctgtgtgccagccagtgtgtggcaggcttaggctttaggaaggtgtgagcctctatccaggccttatcacaccaaacattcttgcacaggctttggaatcagaccaaagcttcagctgtgtatcgttaaagtgtggacagtcaggtggttatgagggtataggagcagcgtatttaagaactgagtacaagtccttgtgcctagtcctcgggaaatagcagttctttctactagagcctagtagtagagagctgcatcttcaagggtctgtagatttcagacaaaggagggaaacagtgacaaaggagggtaacaggtaacagcaactgagcagagacaaacgagggaagagccagaaaggagcgcctgtcaggggcagagggtctgccgagtcccgcaggagccacgatgctgggtttcgagagcccttgcccattcctgcactctcaccaaccctcgctgtgtcctgggcaccaaacagctttgtccaccagtggggcaaccagaggagccagccccaggctctgcctggagtgggcccagtggctcaccaagtgagaagatctcccagaggaggatgccataggaccagacgtcgctctgaaccgtgtagacacagtcaaagatgctctctggggccatccacttcacaggcaggcgggcctgggatgacagtccccagttattttgggccccgactcttcaccccctccccagcctggcccaagccctcccagcacttacattgcccttgacaatgtagttggagtcattcatgatgtccctagccagcccgaagtccccaatcttggccacatgaccattggtcaacagcacgttacgcgctgccacgtcccggtggatgcactgagggaaagcactgcagggttagtcttgggccttctcctacctgagcctgaggtgaggaggatggcagggagggccccacatggctttggagtccctgctggagtgaacaacagttttggtcctttaccacaaacccttgtctataccttctaccagggcccaggatctgagaatgtgtatcgtgatctgatcatttaatgcttagaaacccccattaccctgagcagccatggcccttctcaccctttgtcctctgactggtctgctcaggccccagaagcgaagggcttccgtgcagagagcagtctccaaaccctaccgttacttctgatcatagcagctgctatctgccaggcccttccctaaactctgcacacattgaaccctttttcttttcaacaatcgttatgcccatttttataggtgtagaaactgaggcacagaatttaaatagttgcttaaagtcacggagcaggtggcagagccaacaatcaaaccactgactcccgaatctgttctaaggaagatggcaagagctcccattccctggcacttcttcctaggccgagcgcactttatacgttatctaatatccccaaaattctgaggaagcttccgttatcatccccaccagaccgcgtgctttatgagcagagacaactgttgtctctcatacactatttagtaaaaacgaatgaagaaagcctggtacccttcctcatcttcacgctggggacacaggtgcccagccccagagctccagccctgggcacagctttctcccactcatccttgcagctgctgcccaaatgactctctcatactctgtctcctcccctaccccctcacaggctcccgtttcctcctccccatcgtcactcatccagcctccccggagcacagacctgggtggctatgagccagggccaggttcctactcacattcttggaagcgaggaaggccatgccctgggctacttggctggagaagtgaagcaggtcccggagctccaggggccgtccatcctccttgtccaggtctagggtgggaagaggcgtcagggcagccctgccacactccccacccctcaccccagcagccccttctccttttcccttgttatcaagcaaatggggcctggccctgggacctcctcaccttgctcagagaaggagtcatttgaagaagtggagacaggcctcatctccacataggtgtccacaccctggctggagaagccactgtccctacataggagagagggttggggggcagaggtcactcatcatcactgcactgctcagctcaggccttgaccacccaccaccccatggtcaactggaacctccctttctgataagaaaccctcctgccacactccatctgagtgagcattggtctctgctcggctgtccccggtgagggagcttacaacccattctggttttgggcagctctgcctgtgagaaagttcttcactgttcctaatgccaatctacccctgagattttcctcctagcccctgctctaccctcaagggccacagagaagttggagtcctcttccccataacagccctactagaattggggcatattctagggccccttgtgccctctcttctctggacagtgcctcacacccctggcttcacattaaaatcacttcgggagcttttaggatcaggctaattactaatacttcagaaactctagggacaaaacagtcattcacagatttaaatctccccaggtgatcacaaagtacagcctaagctgaggcccactggtctagagcagtgctgcttacgctgcaactcatgtgcagataaatcaccccgggaatctctgcaatgcagattttgaatcagcaggcctgggtggatgggcctgaggtggtgcacttccaacagtcctcaagagatgcctatgagagcacacttggggtagagaatttgagaagcactactgtagactgaagcactactgctcctaacgttccagccagataggatttctctctccctcctgtcccctctgcgctagagatgtgtaccttgacaatgtccatattctagtgttcccagaaggagaaaccgaaaaaaccttccgctcccttgtagaaactatgcttccgttaacagcctggaatcctttgacagagttggtttacaggccatttgccctcgaaattacccactctgggaatactttccccatctgcgtatttgaagatggaagctaatactttcctttggtgctcattttgatctgatcttcagaggcctagtgtgtgccaccctcatagaagtgtcagggaatcagaagaggaagtgatgctgccaggcccccatttttaaggccctgggtgaagagatggcctccttctcttttgcctccccaggcgtggcagctgacagtatctaggatgagggcgcagtgtacacccttcttgttctgatcctgtcctgaccccacaagcccctgagacagagacctccaggacagcagtgtggcttgggtgactcctggactggaagtcaagagagcaggattctagtccaggctccacctctaaccctgactcatgtgtgacatgaatctccccacttcctctctttggttccccatgtggctctgtctgttggatggctctgttctggatggcttccaggaatcacagcaacaggacaacagagccatctctctttttttttgagacggagtttcattcttgttgcccaggctggagtgcaatggtgtgatctcagctcacagcaacctctgcctcctgggttcaagcaattctcccgcctcagcctcccgagtagctgggattataggcatgcgccaccacgcccggctaattttgtatatttaatagagacggggtttcaccttgttggtaaggctggtctcgaactcccatcctcaggtgatctgcccgcctcagcctcccaaagtgctgggattacaggcatgagccactgcacccggccacatctgcccatctcttactagggctccaggcacagatcttggttgatcttttacacacactgggtggtgatttcattgatgcatatctccaccagattatgagctgcccatctttgccctccacactcccagaacacggtaggtgttcaaatatttgttgaatgaaggggaaaaggagtagagaaacaagagatggccataaaacctgtggtggctacttcccatgacacaggtggcaggtgagggctgcatagccacccattcatgagccatccaaccctgagctggctttgaagacagactcggatcctgcctcccagacctggcctttttcttgtcctttgccaggggctacctgcggacatatttcttctcgaggtggatgttcttatagtcgacgcctccctcggggtcctggccggggctcaggctgggtcccagcatggcctcagccttccttcgcagaaagttgagcaggtcgccatagcaacagtactccgtgatgaccagtacagggcctagagcagccaagggtgtggggtgagggaggtgctgagtgctcccctccatgaacaggagcatgagactgggggcagtgaggccactggacttggactcagcatagctgagttctaacctcggctctgtgagcaagtttccttgtgcctcagtagttccatttgtttaaaacagatggctttggcggggcacggtggctcatgcctgtaatctcagcactttgggaggccaaggtgggtggatcacgaggtcaggagatcgagaccatcctggctaacatggtgaaaccccatctctacaaaaatacaaaaaaatcagccgggcatggtggcatgtgcctgtagttccaactactcaggaggttgaggcaggagaattgcttgaacctgggaggcagaggttgcagtgagccgagatcgcaccactgcactccagcctgggtgacagagtgaggctccgtctcaagaaaaaaaaaacaaaaaatgaaaaaaaaaagacaaccttaaaaaaaatgtagcccaagaattatttcttcaaaggaaagctatggcggctcactgtaggtcagagctgctatcagtgaagaggatgtggggcacttggagtcccagcaaagcccggggcacctttgggggccctggggagagtgtccaagcatccttgaatggaagcttcataagaggtaggcggggggcttcactccagacccagaggatccggctccctggaagcagggcctaggagcttgcacattcatctcctcctccaagggctccgatgctccctatcagtctctctttatacctcaagctgcccgtgcagctcctgactattccaggagatgggcccaggagtttaagggatgctgtgaccgggatccccctgacacttggagcagtaggatcctgagaaggagaagacggaacaaggtagccctggggccctgagattccccagaggccccaagaccttggccccaggaaccccaaggcccttacctccatgggtacaggctcccagaaggttgacgatgttctcgtgctggcccaggtggctcatgatcttcagctcggacatgagggcctccttctcatcagcatgggccgtggctgggaggaagaaccacagtcccaaagacagggagagggcaggacagagagcaccacacagatacatggggaccaaatgcagagacccaggggagaaagcagggcataccccaagacccggagtgaccagaagccaaaagaaggagaaggaaaaatgcagacacacagatggcagagagagagagaggagggatgagcctgtcactgagctggtcttcaggtgacaggaagccaaactgtggccaggccatggccataggtggcctttctgcacccccagactttttggagctcagtcaggagccccttcacaactaaagggtgacctagaccttcttggagccgggagtcagagggtgcctggagctcacaagaaaacccaagtcctcacccctgagctctgtcccccaggcttcaacaggttgaaatgtgtgtgatgcctcttgtgacaccagggccagcccacccccagcatctaccaccccccatcccttccctcatcccctcccctcactcacacttcagcatcttcacagccaccttcaggacagcatcctccttgcccagaccaaaggccgtggcctccaccaccttcccaaaggctccagctccgagggtcttacctgccacgcacacaggtcccttaagtccctgggcaccaaagggcctctgtccaagggcccatgggctccctgcaacccccacaggccctgtgataggaagctgtggagtgatgagctgccatctcaccaaactgcaggttgttccgggggaactcccacttctcgttgtaaggcagctgcgtggggtcgatgaaagtataactgttgccctcatagctctcgatgatcttccagcggacctggtacttgggcttctgcagaagaggaagggagcacgtggcagtcggggctggcaggcagttcctggaccttgtttctgacccccaagagcaggggtgtgggcagtcccaaggcgcccagtgggagaaggcagggcaaggcctgctctgggctgagagaggtcgtctcatgaacatagcactgagagcatgttcctgcttgactctgccttgttgtgtgaccttcccttctccaagcctgtttcactatttgtgtattgaagaccttggacaagacaacctctgagggccctgatatctctgataatctggtaattcctgagccaggagggagggtggaacttgagatcttatccatccgttcatctgtccatccatctacccatccatccacccacccaacctcccatccaaatatatatatatattttaattgtgataaaacatacatgaaatttaccatttcaaccatttttaagtgtatggttcagtagtattaagtaaattacattctaccttgtgcaaccagtttccagagctcttttcatcttgcaaaactgaaattctgttcctgttaaaaagcaactcccctttccctcctccagcccctggcaaccatgattctgctgtctctgtgaattgcactgctctaggcactgcacctcagtggactcacacagcatgtgtctattgagattgccttatttcacccagcataatgtcttcaaggttcattcatgctgcagcacaggtcagaattcccttcctttttaaggctgaataatagtagcccatccacatactttcttgaacatctatttgtgtcaggcaccgctgattcagagttgaacaggacaaagtccctgcccctccatggagtttgcattctagtggctgagagaggcattaaacgcaaataaacatgtatctaggagattctcaagtggtgctatgaagaaaataaagtaagataagtcagggaaggcccctaaagagcccaccatgtgaccatcagaggaagaattttccaggaacagtgcatggaaatgctgtatgcttgacatgggaatgatcctggcaagtttgagctataggaaggcagccatcatggcttgagggaagtggggggcagattccagaaacaggaaggccttgagggctatgataaggtgagtgggttcccttttgggatttttttttttccaagacaggatctctgtcccccagactggcatgcagtgggggcagtcttggctcactacagcctcgacccccgaggttcaagcaatcctcccacctcagtctcccaagcagccgggactacaagcatgtggcaccacacctggctaatttttgtagagacggggctttgtcgcagcctaggctggtcttgaactcgtgagctcaagcagtttgcctgcctcggtctctcaaagtgctgggattacaggcatgagctaccatgcctggccgggcagtgagagaccctgagagtttgacacaggtgagtcgccatctgactttttttttttgagacagagtcttgctccttcactcatgccggagtgcagtggcacgatcatagctcactaggctcaaactcctgggctcaagcaatccttctgccttggcctctcaaagtgctgggattataggcgtgagccatcgcacccagccttgactttacctttttgagagagaaagagagacgctgcccactagatagattctggaggaccagcacctttggaaagacctgatttccttccttaggctctccatgctgttaccacccagccaggggaggcaagccctgggatgtggggaggaggaatggctgcccctgtttcttgcccaggggtcagctgctgagggggagtaccatgctaagggttgcccacaagaaatgctgatggaagaccaagttgagggggaaagtggaagctgggctggggcggtggaggacactgaggccctgggtcagcagagcaactctttccggccaggccttggggatgggacaagcttggctgtgcctgcagctgggctccttccctgggcacccgagctagaaacttaaaggaagtgtggaccggtgctagggaggaggctggcctttagctgcaagtcctggttgagagagaagattccagtcatgtcctttgcagcaacgtggtgcagctgaaggccattatcctaagcaaattaacaccgaaacagaaaacctacataccgcatgttctcacttataagtgggagctaaatattgagtgtgcatgggcataaagatggcaccaacagacactgggggctactagagcagggagggtggaagcgggcgagggttgaaaaactatgggagctatgctcagtagcaggtgatgggatccatattccaaagctcagcatcacgaaacatacgcatgcaacaaacctgtacgtctatcccctgaatcaaaaataaaatgtggacatttttaaagagagagacagggagaaagcttccagctaaccatcaggaagaacttctagctggtagttagagagaaaagactgcaattagaaatgagaaggaactaacttccaggctctgattcggaagggcggactgcaggtgaacttcagagcctctgcgttatagcttgggagagagtctgaaacgggacccagggagaagaacttcccaagcctctgaggatccaaatcctgcccgtgggtgccttcccagcccaaaagacagcaacaaggcaaggaggggattcttcagcctctcctggccacttccatctctaggagcctctgtggctaagactgttttttcttaccacttcttgttcctctgtccctctgcagctgggctgagtcagcccctccctgcccccagctgggcagggggcactgttgaaagggaggggatcaaggaggatggaggtttggctggattctcagatttctgaatcctaggctcctaatttctggaagcggaccaagctgccttctgcctgcctcaggaaccctcccctgcccctgctgggcatgtaaacctcccagggcacctgtgccatccctggaaagggctcatgggcgtctacccagaggcagcctctcttccaaagaactatgagtgagagatcaagaggtggggatgggcgaggctccctgagaagggtggacgtaattgtcatgatggcagcgggttcttcctgagctcttcctgggagtggggcgctgggctagatgcttgaagcacatcaccccattcattccttgcaatgggcctaagccccaggcccaccccctgacttcttcccttcctcccatcctccccaccaaagggggcatggagacaaagtcccggtcccctccccatctaggcctgctggttctgggtgagtggatgttctccatcccaggaaggtggagatctgaacaattcccagtggaatctttggggaccctcctgttgctcctcagagctcagttccagcccccagaatcgtagtctttccagcagcctccctggaccctcccttccctgctgcctcagccatttccctgtgcgcctcctcctccaggggagcctgctgactcctgcccttttctcttcccccacggccccccttgtggtcactctgggggacagaaaggtgatgattcagccctgaggcagaacaaacactccccacagacaggccacttctttccccaggcctgggcaatgaggagaggctgggctgagtccccagtgaaggggcaaggctccgaacctcatggggcaaggcagaggaggatgggagggcaggcacttagcacgggcatgaccatcctgccccctccgctcccatgggtggacacctcggcctggagctaaagggtctgtgaatgggtgtaggggaggagggtagctgcaagtcttctcgcagccttgcatgggctccaggggcagctgaatttcctggacaggaagtgtggaggtgacatgttccaaaaatggtcccgtggagaggggatacagagttcctaaaccacagccaagggggctggccagcccaaggcagaaagggccgcagggggccctaggctcttctctggaatctctgcatgactgtcctggcagctctgtgggcactgcgaggcagttttcagttccatgtaaggaagaactttgcaaacattggagctgctcagagaaggaacaggtggccccgagagtgagtaaggtcctgtccctggaggtgggtgggctgggccaaacaaccgctttgggtgtgtagtcaaggagatgatgcccgacctcagacctccccctccttccaccatcccaagaggcatgagctaactctggttccccaacgaacttcctcctgggacaagagtgtgcagctcccatcacagagactgtctcgtccagcaccccgctcagtcctctatgtgcgttgtggtacggaatccctcacaacaggctgttaatgatcccattttacaaatggagaagagactcagacacaccaactttctcatcatcccatagccagagcttggcagaggcaggatttggacccagattcactgaagtccaagtttctggtgcttaaactagaccaccagtgggctcttggcatgtcagaggaggaggggctgttagagaacacccagacccatggtataagaggggaaactaaggcccagagaggacagcgagtcagctgaggttacatggcaaaacagtgtcagagctggacctagatccggaggtattgaccggggctgccctcagagcagccttctcatgctgagtgctggcaggagtagagatcccgatccatgtgcccctggggctcccccaacatccttcccaccctgcccacttcaagccctcttctcacaaaagccccaagggggtgtggggaagaaaaggtagccaaggggacacaagatgggtcattcagtccttgatcacaccactcccttgttcaaacccactgatggccttggaccgacagggtggggtccaacccttcagacccccaaccccaccctggtccttccctcacctgcacctctgcacactctgccctctcccccagaggtaccctttcccttagtgtcatctcccctgctgcatcctcatcctccaaagcccgtcccaccaatgccaagccacctcctccaggcagtctcccttacccaccagcctgaaaagtccgtccacctctgaactcccacagccctctggcctggtcctctcagcttctgatcacattgcacatggtctttgtgtgggcaggcaggcagtggaggccatgggctctagggacagaagcccctggggcccagtgccaaccctatccctcagccccttggggtttttttttttaaccttgctgagcctcagcttcctgatgggtaagatactgactagtatacttcctgcctccagcttcttgtgagggtaaaataagatgagtcaatgtttcacataatgattgggacatgctttggagtgagtcctccttcagggttaaaaaccagactctgcctttgaccagctgtagacaagggcaactgtcccaacctctcagaacctcagtttacaactctgtaaaacagactaatgctagctgcatacagtggttgctgagggcattaaatgagatgatgtaggtaacatgctatagaaaaatgcccctcaaatcactgtcatatactgagcagacagtgacaggaagcacactatacgcaacatgcactaaattgtggctttggctaataggacagtaacatgaaataatgaagaggatgatggtcacaggccctcgtcttcactagaccatgtgcttcttagggcagggctcaggcctggcccaggggacaccacgcttgtatatccatttcctctgccccgtgctgggtgccaggacacccctgggctgagacaggatcccagggctgcgctgcctcagaatgccattcctctcctcatagcctctcactctataatccatgctcttgctttcacggctttttgtttgttttttgagctgggatctggctgtatcacccaggctggtccctaactcctggcctcaagcaatccccctgcctcaacctcccaagtagctgggattacaggtgtgcccttgctttaatggctatttgattagcacctgtctctcgcactagacagtaaacgctattagggcagagcctcagaggccacccagcagctgactcatgttggcatacagtaggcacccactaaagagctgttagctgatggactgactgaggaggaggaagggtgaatccatgcagcctgggggtaccatccaaatctggctcactcaggcacctggcagccccactccgctccggctcacctgcttatacttgtacaatagcagcaggagcagcagcagcagcaaggccatgatggacatgcaggcgaccaccactggtgtgaagaggaactcatccgggggatgcgtgtgggctcctggaaggcatgaagcaaagcagtgagcaggcaggggtgcctccgagccccctgaggtcaggcctgcacactgcctggaacacagtgggtgctcaataaatgcttgttgactgaatgaagcatcctccactggaagcctctggagcctctcctgcacaccctccccgagaaaggcagagaggacggcctcttcagctctgctcatgcccagccccaaaccctgtccagagtcacagcctcctgtggctgggggtagggagcctctggggtcatgcagtctcaccctctgccagtgcaagaaacctctctgcagcggcctggcctggtgcccagccatggcttgcatgcactacacctccaggaagctcgttcagaaaggccttctggaggtcacactgcaaccttcctctcctgcatttcccctgcagcttctccacatgcctttggaatcatacagcccttctgagggtctagcaagccaggcttgtggcccctgagtctcctcttcccagaatctatactactagttctagtgatgttttggagaacataatttccacttccttgctcagatcagtaacttagatctgcagtcaagtttcacctgtgccacttgggagctgtgtgacattgagcctagggaaaattctatttatttcctaggtttgtaggagttaatcgagataatccccacaaagagcttaacacagtgcctggcgcagcagaagccttcaacaaaatgttggctttattataatatacaacctccagcagtgaggcccagcgcggccgcaggctcctgcttgcagctggaccctggtagcagttgctccaaggccagcagctggggacgtgagtgaccacccctgagccaggcagatgccagggtctggcacacagtgggtgccagagcctggttgtcaaaagcctgaggatgctgtgggcctctgagaatcacagaactagctggtaaggagcctttgtgtaaagcagagaggcagcctgtgttgtgcacagggccgggcatcatcccccggggcagcctcttgcacagcaacctcaaatggatagactgtgtctggagcaagaggggagagttggagaaggccgtccttagctggccccgagctggagatggactgtttccttgctcattgcctgcctccctcatcagcctctgagctctggggaggcactgcttccctgcatagggcacgtccctggcacacggtgcataatgcctgcacatacttgtgaatagatgcatgagttagagtgcagggacaagagtgggggccagtttcttcaggctgctttctctctgctttctcagagactaccccgtcctactgcttcgggggacctgccaggcaggaggggcttggactggcccagagaggtggaccttggtactgctaggatctgctccaaaggtggagccaaccccagctccctcggtggggggtgggggaggagccgcctaaaggagcaggggcggggggcgggcgggggggcggtgcgggtgcgaaggctccctctcacctgcagagatgggtatgaaggcccaggagccactccccacgctgttgtgggccctgcactcgtaggtttggttgtgctctaaggtctcaacagtcagcaggctctgcaccgtcaccttgtggaagggctcctggctcaggacctcagggtatgggtcatcccagacctgcagcacttgggcctcatcacacctggcaaaagcagaatgtggctcagagcttcagggttcccagcgccagcatgtccctcccactcacagggtgcccagcccctgagcccaggtgagggaggtgagtggagcccacttacctatcagtgtggccactgcactgcagccatgtcacgttgggctgggggtacccagaggcagcacacaaaagggtgccagagccgttgatgaatgtccatatgacgcttacctctggggggtctgaggaagaaaggaggaggccccaagtcacactttccccgccacctcccaatctcccagtacctacttccctgtgccctgccccagtcaaccccatccctccaggcagtcccagggcctccgccccaggtggcgctcggccccagcactcacatcgaagggtgagctcaaacgtcagagctctccagcctcctgggtttctggccaggaaggagtagcggccagcctcagagggcttcaggcggggcagagagagggtgaaggtgtgcctgcaggagagaatcaggtggtgttggtgagccccagcctagtatggcccctgccaggattgcagtcagataacagccttaaaggggtttattttatttttggtaaaatattcagggcccaacggccttgggtaagccagatactcagacagggtgccattgagacatgcaaaaaccaccaatcccatttccttagttggttttcttatctgaaagtgtttttttcccgaggtttaatagaggtgatgtcttcaaggtgctgggaggcctatcacaggtcgcctacgttgaccactgtcactggactaagctttcatgaaagctgcaatccctgctacaaatccctgaagtgccaaccttgccaagagggactgagaaagagacaagaggcaggatgtagggccctgggttctgagccatgttgctgcagagactggggttcaagtcctggtgctgctgtttcttggctgtgtgatcttagacaagtacttaacctctctgatccctcacttcctttgctgtgagagtgatatcgatggttattaattcacaggcttggcttgaggattaaaggacctttttagggtgcttgacacagaagttgaatctttgtgggcactcaattcaatggtaccctttattacagaaaaggccctggagcaaaaactaacaataaaaatcatctttggctgattctgggaaattttttgttttattctttctttaatctctattttacaatttgtccataatgaacatgtgttgtttaggtaataaatacattttttaaaaagtcccccagttcactgtcaaaataaataaaattttaaaaattatagcaaatggccagttcttgcttgggaaatgtctgcagctactactagactaaaatctatggtattcagagagcagtctcatccagccagaccctgggcatatacaaggcctctgcccaggtcacttcttgagataactaacccctttaactaaaaataatttgacttttttggataattgaaagtcaccattatgaacaacccatcacatgaactaaaattctgtggctgtttggtgtccaggcttgtctgccttgtgctgaatgggcccagactactgtgttttaggggatctcgtgttcctttcctcaatgtctctgtggcttatggacccattaaaccgatccatggaccagccccctccaaagggcctacacattccagattcagaacttctgctttaaatgagaggaagacagagacctggccagaaaggaccagaagggaactgagaggaggaagatgaggacaagaaaacatccttgttgcttctgacaattgacaagcaagattgtgggaatcaatgaggtttgggcttccagagctagaacgagaatcccaaagagttttgaagttgtctaagggatccacacagggatgacaaacagatctctcatgagccaactatgctggaaatactgcctgggacctgtgttgaggaggactctgaggccgcatctacactctgcagaacagagttgcagaaacaagaatgagagtgagtgtggcatgcacaccacgtattcgctgcccttaagctgtactgtctccctctgaaagggcagggtatgaatgattatttcaggccaggcacgatggctcacacctgtaatcctagcaccttgggaggccgaggcaggcagatcacctgaggtcaggagttcgagaccagcctggccaacatggtgaaactctgtctctactaaaaatacaaaaattagctgggtgtggtggtgggcatctgtaatcccagctactcgggaggctgaggcaggagaatcacttgaacccgggaggccgagtttgcagtgagccgagattgtgccattgcactccagcaacaagagcaaaactccatctaaaaaaaataataaaaagaaagaaaagaaggaactattttaatacctgagttaatacctgatatacctggtatgagtgttcctcttaggcacaaagctttcttatttagaacctacctgcttaagccactttggatgagaaagcaagaccccaagaacacagttcacaagcagacaggaaaaagatttctaaaatgtgtgtggaatacacaggattgtgggagtggagagacggaagaagaggggtgtggagttattatagattgcacttcatgggaagagttttgagcttacagagaagagcagccagtgagaaattcttggggctgggtgatcacaatcctttaaagaacatttcatgtatctgtgattgtgtgatcttaattccctcttcccctccctccaagcttttgtatgtagcagataacttgtgcagtcattatcaggagtgtgtctatgagtggggctgttttctgcatttggattggccccaagagaggaaaatgaatgaggctgagggttcttgagggaccaatgagaatgcacactcccaagaaatggtagaatccttgggtggggcattgactatcccaaggatgtgggatggagaggtaggtcaatttcatctagatctcaaacacagatgaccaatattgggattccatgaagtcagggaaagcgaagcccagaaaggggcagggacttgctcaaggtcatacaccaaggttgggacatgagccaagcgtcctgatgcttgctgaagcataccccatctggttgtcgggctgtgtagacgggagctgataagtggtacctgtatgtgtccttggtggtagcattagcaagcttgggctcaggctggtggtcagaaaagggtcccaggtaggtccagttaaaaccttgcaggcctgggtaggcctccaccatgactttgaggttgagcccctcccccacggtcacctcctggatgaggttctgctcagagctcaagttcaagtaggcactctctggaaagcagaacacacaagcatctggcattagtgggaagatgtccttgtttatttgtccattttgtcatccacccattgatccagtccctgagcagctatgtcacaggtacatagtccccaccacccaagacaggtcctctgacacccctcttctcaccacccccttcagaatccctggatcaaaacttttctcactgaagccctaggagaacctgggcaaatccctatccccatttgtgcctccatctccttatttgtgtaatgaagagattgaatatatctgtgattttccaagtttttgaaaaatttttggcagcaagaaaacacacacacacatacacacacaatttcacgtgtcctcatccatttccctttcttctggtcataaattagtcaatgcggcttccaaatatagctctggagtaggtgtgtaacccaggccaaccagtgagggtactctgtcccctctggcccggtgattggtttgggttaccatgaatccatgagtccataacactcaattccatgatttttgttaagactctgggaaaagagaagccctcattttactggtgttgctggatcagatactacaaggcggatagtcggagtcctacaaggggaaagccttcctggcagggctgagagttggggagtcatagattctttccagcatcagctgaacacctggatccaagtgttcctgaagctgatatccatgagctttttagctataaggaaaaaaatccttttaattaggccagtttgagttggtttctattacttgtatctgaaagagtcctgactagttttttttttttttttttttgaaacagagtcttgctctgtcatccaggctggagtgcagtggcacagtctctgctcactgcaacctccgcctcccaggttcaagcgattctccggcctcagcctcccgagtagctgggacaacagttgcatgccaccacgcccagctactaactagtttctcctaatgacattttgcacagattgtaatacagctgctcttgttgaatctcaggcaagggaattgtggcaagaaccccaattcactcagcctctccgtgcctgtcatggtagcccctgacatgccttcttaaaacctcagggctctgccacaagccctggactagatgatttctaagagctcctctccttactctattctgtctaaaaatctgaaattcacccttctacactgatatatgtctactcaaaagccctctatggagtcccattgcctccattattcagcgtggcgttcaaggctctcaatcaaatcaggtctcactgtgctcatccagccacctcccctcttccttcctacacacacacactcaacgctccacccatctgggtctcctaacatccctgaacacaccatagtcattccaaccttggaggttttgctcaagcaatttcctctaccagaaatcccatcctcctccttttcattatagaggcccctttatcctttaagattcacccccatgagggagtctctactcagtgctccaggacacaggaacctctcactccactcgacttttgctgcccttccagactacacactcattaggcaccacatctgcactgcttcatgcatctggttctccctccaggtagctttcttctctctccaagtagtctgtgagcttttgggggcaaggcttttctcttctctgtctctctcaacaatccatctatctattattcatccatccattagtccattcatccatccaaacaccaacaacttcctgctgccttcaccattaccactctagtccacccaccatcagctccagcctggaccactgcggtagcctcctttcatctcaccttcccactttagctctctgacctcatctgagaccactttttttctcactctctccccgcagccacactggcccacttgtcccctgaacatggcaagcacagtcccgctgcaggatggagctcccttctccaaaatggccgcatggcttgctccttcagcaatttaagcctttgctcaaatatcagctttctagtgagatcttccttggtgaacaccctatctgaagctgcaaatgctatataatttgtttttttaataatttacttggctcattgcttgcccactcccagctagagcacacacttcatgagtcgggggttgttgtatctgtttcacttgcagctgtatcctcgatgtctagaacagtgtctggcccaaagtgtgaatgaacataaacatttcttgagtgatgactgtatgcctgtactagaaagcagacaggattagaagccgtaactgaattcttgtgcttttgctcttcttcccctttaccctgccaaagctcccagtgcagattggggtccacagcagagctcacaatctgctgcaagtccagtgccttgcacatactctaggggcagtgatgctcatgattctcatgctcctcgccacctccatctcccataacattcaacacatgaggcacggccagacctaaatgtctcagagcctgctcccactccgatgagctgctgccttgcttcagggtctgagtccagtgactgccactgcctgcacccaatcaccatagccagagacctggaggtcatccttatctcctttctcttcctcatccctgcatctcagactcttccacacaccactggccatcttcagcccattctccagcctccaggttcccacccaacccacatggtgccagactgagccttctcagatactatctcctggtgcacacttggacagcatttcctgtgtcagaccctgttctaagtacttcctatctatctatctatctatctatctatctatctatctatctatctatctatctaatctatctatcttctatctatgaaggcagttactgttaatatcttcattttacaggtaggaaaactgagacacagggtggttagcaacctgctagtccttggcagactcaggttggaacactgccctggagtgtgtgctcctgaccaccacgaagtgcctcctctgtacaatctgaccccatcactctcctctttacaatgacctcccaataggttaagatgcagttattctttctcactttaagacacctttacctccggcttctgccacctcctctgctcccctgtggccactcctcacaccactccacatcccagctgttgtcaagttctttcagtgttccaaatgatctatgttctctttgcctttgagccttgcatatgttcctccctctgccagaagcgctgttccccttcctttcccacccttctgcccggccaactcaccttcattcttcccatcccagtttagaggccaccttctcgaagcctgggttggggggactcttcagtgttcccaggacaccttgtgcttcccccataatcactgggtgatcattgtcttttcatgtttccataaaggaatgcatgaaagaatgaacaaatgaagtccagtagggagctactggaccccaatccccaaataaacaaaaaatggcactaaggtgcacccaatgcagccatgcactgtaagagctccaagatgggagagagatcccaggagagggtaagggaaagctcctggagagtggctccttagccaggccttggataaacaaactccagcagagatatcctcagcaggtctccttccctgacatcagcttcctcctcaaaacccttctgctcacactcctgcaggatccctaccgactgtccaccaccaccctgatgcttacctaccacccggaagaacatggaggtggagtgcttgccctgcacgttgctggccacgcaggagtagttgccggcatgttggaaatctacttgatcgaggttgagggtcaggactttttggtaacggttattatgaaagtcagattgttgagggattgcgagctgcagccagaaggaatggagatgttataccaaggtagtttagggattagaaagatctgggttccaatcctcagcctttaaggattactatctgcctttcctctgagcctgttgcttcacttgtaaaatggggctaatactggctccctgccccaagactgtagtgaggagtaaatgagatatgcatgcaagtggcttagggctgtgtctggaacacggcaggtgcagtgggaagggagggggctcttagaggcagcccaacgtgagtccctcctggaatcctccctcctcctccctctctcccaatgtctttctgaaatagctgttatattcctgggcttcaatggtggcctaggaaacccttgctaaatcagaagtgagctcacctctggcttttgtctaaaggctggggcaaaggccatgtgtcaaggtgacagagaaccacctccccccacccacccccacaaagttcagcggcacaagcatgagtcctgattctgtgtcagctactgactgggagtgagatctcgggtgagtctgcacccctctctggagtctgagctgtgccttcagctaagacagccagtttggagttgggggcccaggactccaccatgggaaacctggtgtgctgggaggatggccagacttcaccttgtgatctgcagggactgaccttggtgttgttgtgttggaggaagacatcaaagttaacatcaacgctgctggctgagcacacgatctgggcagcctcccctcgaatccgcaccagctctgcaggcaccagtgtcaaggctgggggccctgggatgactgagaccgggggagagacccctgaacacccaggctccctgaacatgatagagatattgctctcctccctgccatgggccaggacacacaggccagggtccccatcactgccccatcccaaatcctgggaggcagccttgatgctcccagtccccccactgcaaggcctgtcctaaagagaccttggaaagtctactttctccatcacctctacccctccccagtcccgtcaccattctccactctggacttctgcaccagcctcctcagagacctccctgcctccctccaagccccccacacctagattcttcactaaagtgacctcttacaaatataaatgggaccatgcctctctcctctgtaaacatttggggcttcccattactctcagaaaagaagtcaaagtccttccacagcccaacctgtttctgaccgccctgataaccccaccccttgttcactgcactgcagcccgctggacctctttcctaccacagggcctttgcacccacctttccctcctggaatgcctttcctcccacacttcaaatgggaggctgttctcatccttcagatctttagctcaaaaattcctcagcaaggcttctgtgaccagctgatatgaattagcctccccagcacctccatgcccgccactccccagcttggtttcttgctcatcacatttgtatttactttctatttaatagttagactctagtcgaatgtcaaatccgtgacaggaatattccagcagccagcaagatgcctgatgcacagtaggccttgaattcatatttatgcccattgctgctgttgaaagataatctaatccagattcctaaggcccagggacatgaaaggactcacccaaggtccctgagggggtgtcaaggcagaactagggcccaggacctttggctcttggccagcccagggctctgcaggatgaaatgccaggaaagagccctaatggcctcctctgcccacacagctggggtcctttgaccccctgggcaggtttagtggcttcagatcccagtggcattgggctagctgcttcactctgaccctggcccttgttacagggactgattgctgtctcaagcccaggtcctcaggctggggtcctgcttgctctcaccagtcctcccagaaaccagaatcctgcctgccatcccagcagggtgagactccacctccactgttacctggccaccgcgagagccatcacacgcacccaccatctcctccctgcctcttggctcagcatccctcctacacatgcccagcacttggccttaggcaggcccccagtgggaaatccatgtctgaggctgagcttccgtcctctttccatacctagaacattcagagcctgtccccacctcaccacttggtactcactgtccccctgctgaagcagatctttgcacagccaccttcttcatgtcattcagatttccgctctaataaagtgtttccttctcagtgaggctccccgccctacacactccttattcagctaccatgttgaatgtttatttttgtagcatgtccaatgacttgagatgaccttgcccactgagttatttgctcacatgtggtttgtctccctgccccgacaccttgtcagtcctgccccatagatgatcgtggaaccattgaggggaagaagtgaaagaaagaggacatcccactgccccccatcacacccagtccccagtcaccacccatgtggccgccggctctctgtccccactcttcaggcctggctgccggtccccatgccccacgcacctttctgcactttcagccggatgctgatggacatcaccttcctgccacccatcagggcactgcattgatagtcctggctctgaatgaacttggccctgtggatggtgaagccatgccagggcgagaaggagtagttggtgtggcgcatgaggggccggccacgcacacgcaccagcgagacgcctgcttccagcaccgggtctgtgagcagacagggcagtagtgcgtcctggtcctcgaacacgaccacctcctgtgctagcacgttccagggccgggcagggtctagagtagaggagggcacagggttacaactgccctccctccactgggccaaggagtacctggacataggtgacaaggaagctcagagaggctgatcattcatctgaggtcacaccacgccaggacagttcagcggatgcttcagcgtggtggctccagagtcaggcgcacctgggctccagtctagtcccactatgtgaggctgtgtgaccttggataacctccctgcacttctagaaaatgcatcatcatagacccgacttgcagggttgttgtgaggactgcattacattagcagctcttccaggtccttgctcatagccagcactcagtaaatgcagagctgaattgttacgattgttaattttagggcccattgtagtggggcctgccgggtcaggcctcttgggaggaggctcagactcctcacctttgacatagaggtggatggcggcgctgcctcccagggggtctccaggctcagtgcagcgataggtccccgtgttttggaaggtagcgttgttggtgctgaggatgctgctggagccatcagagtacagggtccagtgaggtgatggggggccatcccattccacgctgccattgcccacacatcgcaaggtcaccgttgctcctggcttcacgaccagctcagggacactgggctctatcactgggattccctgacctggtgggagagagggacagcagacagaagtgaggtctaggatgcgccccttgggccgtcctgactctgagatgggtggtagcttggcagggatggtgctgtgccatcaagggaccaccttgaacgagcccctgccccctggtcatttgctcagctcctaaccctcaacctgctcagggacagactgatgtctctgatgtccaggaggtccctcctctgagaaagggggcttgcagcttgctcagcctctcacccaggcctctgtccccctggggtcctcagcctcctgcctcagtcttccctgctgtgatgccatctttctactccccaggaatggactcttttaaccctgtgtacaaagtggacgtatttctaccaccgaatgaagaaacaaatgaatggaatgttcacggccaagtcctcagcttaattcatatgggaaagaaaaaaaaagagatgtaggatcttagcccagcagagttagagaggtcccaagaatctcctggtgtgcccgctcccaccaatggacatctggtctgcagcacagtgggatggggaggtgccatgcctcagtttccccacctataaaacagggacaatcatcgtacccactcattggtatgttaggcattttaaatgcatgggaagactttagaacatcacctgtcaccaaataaatggctcagtaagagttagtcactatgtttattacctagtctacacccagcagctcaccccggcacccccacacatctgtgtttactgggaagccaatctcttttaaggaaaattttcttgaaggagaaaagagaacttgaaacccctatcaggctgtccgggaagaaggcccgttgcctctgcagcgtcagcatttttccagggcctaaaataggggcaaaggagggaagtgagagctgattcaagcctccgaggggctgccaggcgccccccagcctgtgtgggcggaaacacattgttggcgtcaggctcagcccccggtttccgctcagcctgtggcccttctacagggatgttctcacttctgcttccccagcctcctagccactctcctctctccaggcagggagagggagtgccacttgcggggcagctgtgaggctgggctctgacgctgacccactggctgaccctggccatccaactcctcagctctggcccttcctcttcccagtgatgggggcacaatgacaggccagccccgagggctttcggtgaattcagggtatctccattgttctctgcaaacccccttgaaatggaaattccccctgccccaccatagagcccagaattggaaaggtttcctctctcaagtcctttcaggatggcttaattcacgttttgattttgtattcatcagaatgtgcatcccttctccccaagactctgatcagcaaacgagattgagtgaattgtgaatactgccaagcctgccacctggggttgtagccctcctatgcagtgcaactgccaggaagagggacaagtgtcatttctagcagcctttttagcaaatctcaacagagctggggctgccctatcactgctgcagcaatctagggcccccaggccggggttttatagcaggaaacagcttggagtgtgggctcacaccaacttgggtttggatcttggttcttcccttaccagctgggttagtttcttaacctctttgagcctcaggctattcttctgtctgatgggaataatcccagctcccaccccaaaaacttcagctgaaggttgagtgagatgatgtatagaactactcctgccctgggcacctgctttaattgctacatttctaatgtcccttctgggccaactctgatcgctcaagattttaaccttggattctgtgattccatttgttccttttttacacctgcctcacaccttacagtgggcttctcccatcccttcccccagcctgtctctctagaccctgccttggcctccaggaaatgtggtcagggagcggtgtctgccctattttgtcctatcctattgtcccaggtattcacgcaggataaggctgatacccgcaacttccgcagccaacttcccctgctggcttggctagcagggaaggaagccggcttggcccccatcctcctcggggtgggggcatgggcttatgaacattaactgaggtccccttctgtgcctgtccattcttcccccctctcatctccactccccaattctccccatgccccacacctctccactagctcccacttgcctggaagcccctccctcatcacttccagaatgtgccccaatctctactcttctctcccaacacacacacacacacacacacacacacacacacacacacacacacacacactgcacactaaggctggacacagcccctcttcagcccaggatctcatcgcagtaatgaagagagagcccccctctctctctagggtcctccaataccatccccagtctcctcacagtggcccctcatccactcatcattggtctgttgggctgaaaacttaggtttccagcctccccatctcttctttctcttgggactggaccctggaaaaccatctggcccccctcccacacaccatgcccctgtgaagggaaaataaaaacttgggaccctaattcactctgccaaaaggaaaaatcaagctggaaactgagtcatgcaagaagctgccttgccttttattcctaagcagatagcgacagataaaaggtaaaatatcccacaggcagctcctctatgttcactttccctatgtaaagagccaatttactgaaccgagataattgactgttcccctacctgctgcttttcttttgcaacatgtggattaccacaacctccccttttcccctccagcccactttcccctttaaatattaaagccctcgaattcatccagaatggcacagaccacagaatgtttttgtgactccatgtttttttctcgccagcatgtccttaaccttggcaaaataaacttctaaattgattgaagccaggcacagtggctcatgcctgtaatcccagcactttgggacgccaaggcagggggatcgcttgagttcaggagttcgagaccagcatggccagcatgataaaaccctgtctctaccaaaaataaaaaaattagctgggtgtggtggcaggcaccagtaatcacagctactcaggagtggcagaattgcttgaaccccggaggcggaggttgcagtgagccgagatccatgccattgcactccagcctgggcaacagagcaagactcggtctcaaaaagatagaaaaaagaaagaaagaaagaaagaaagaaagaaagaaagaaagaaagaaagaaggaaggaaggaaggaaggaaggaaggaaggaaggaaggaaggaaggaaggaaggaaggaaggaagaaagaaaggaaggagatggagtcttgctctgtcgcctaggctggagtgcagtggcatgatctcagctcactgcaacctctgcctcccgggttcaagtgattctcccacctcagcctcctgagtagctggaactacaggaacccaccaccacacccggctaatttttgtattttttagtagagagggggcttcaccatattggcgaggctggtctgaaactcctgatcttgtgatccacccgcctcggcctcccagagtgctgggattacaggtgtgagccaccatgcctggccacaagactccatctcaataaaaaaaataaaattaaattgagacctggctcagatacttttccgtttttgccccacaggcaggttgtgggtgtaaggataggacaaggcagtgaaatcaaacctgtgggactctctgagatgaagggggtggcgggtacactgtgtgtgcatttgtcagacctcattgaacttaagaacctgtgctttctactgcatgtaagttacattgcaaaataagaagtccaggccgggcgccgtgactcacaccagtaatcccaacactttgggaggccaaggcaggtggatcacctgaggtcaggagttcgagaccagcttggccaacatggtgaaatcccatctctactaaaaatacaaaaattagccagtcatgatggtgtatgcctgtaatcccagcttgggaggctgagacaggagaaacacttgaacccgggaggtggaggttgcagtgagccgagattgtgccactgtactccagcctggtgacagagagagactctgtctcaggaaaaaaaaaaaaaaaacccaaatactcaagctcagtgtgattgcctgggccagagaaggatggtcagtgggccatctcctcctcatcagggaccagaagcgccacggccttagggtccttctgtgaagaggccagtatgaggctgtcctttctccccttcaatccccatcctcccccaaggtccctttgaataagcaggcaatagaaatgtgtttgttgggccaacaagccaagcacagcagcccctcacctctagtcatgttccctcccagatggaaattctgcagaactgctacagcctggggacctcctgagacttggcagcctgtgtctgggagggctctggtccaggagaccctcactggcctcttcccaatccctcctctagccctatacctatttcaccccgaattcccctctcctgagccctgggccagagaggccaacctcttgtctctcccctctgaccccttacacaagccacccaaggaagaaccaccacccctatcaggcccttccaaatcagatcttgcatagaatcatcgaatcacaggctggcagagctgccagagccatcaggagctctccaggtcctcccaactcagtgtaggtctggaccagcagtgccggcatctcacatctcccaggagtgtgttggatatacagaatctcaggtcgcacctgagaccgactgagtctgaatctgcattgtaacaaaatcctcaggtaacttgtatgcacaggaaagtatgaaaagcactgctctggtctagtctatcactgtccccctgcccccaacacctgcaattgaatagaagtggacactgaagcctcaagagtatcagaggcttgctcaggacacacagtgagtcgctggcagagctgggacagatccacagcaccaggtggaccagttccaccacacccatctcttttcaccccactacctctccaaagcagatacccacaagcctgcagtccagtgttggggagactaaaacagcctgaggacacccagtgaggggcaaggactgaatcctttcacaggggtcttctccatcacaccccaacaaagtcccccaccccccgttctgctcttaccatgccaagctgtggccaccagcaggagcagcagaactcctgggcccatggcctcggtggggaagtggcaggcaggtgcagggctgcaaggtgcccagggcacagagctctcagctactagctccgcagggatcgggacactggacacacgttcctctcctctgcactggctgtttgtcttgttttcctcttcctcctccttgggctgatcctcttcttccccttttagctaggcaaggcaaccacagagtttggaaatcttgggtctttaagaagaaaacaaagccttgaacccaagagggaggggtcgcagtctggggcagggccagcctgagcttggggggagctagctaagtttggggcccttctaaagccatcttcaaggggtcttgggagaagagacatgtccaagagcagccagaccgttagtcagtagcacaaatgagggtcttcagagtgatcaggtggctctggcagatcccaaagagaagttaggttgcatgatattgtgacatatatattttttctttaccctgatgtcctggcttacaactcctaaaatccttggaatctccaaagtaatgcatatcttttaaaaatttattattattattttagagacgcagtttcactctgttgcccaggctggagctctgtggctcgatcatagctcactgcagcctcaaactcctggctcaagccttcaagctgtgagatctgacgttatctctaggtaaatatagtgttcaaattgaatcggagggcaccagattcgtgtctgctgcagaatctgaacaattggttgattgcttggtgtatggggaaatatgccccatcctctacatctggggtcagaagtattttgtgttgtgagactataggagaaacggagtttgttttcttcctgtatacaggttggtctgggagagcctgataatattggcaataagcttccttttacaggacatttactagccaaaccttttacattcactgtctcctttagtactgcaaaactttatgtaggtaagtactattgtcattctcatttcacagatgggaaaactaaagctcagagagatcaaatgccttaagcttgtccatagtcaaacagctaccaaatggtggagataggatttggatcccagcagtctggttataaaactatcttttgtgcgttacttacattgtttatttatttttacaaagaatctaattgttctgcataattcttaaaatatatagcattcctttgctccctcttttcctggaggcaattgcttttacctcttttagttgattcgcttagtattttacttcttatctctaaagaacatggtcatttcttcttctttttttctttttttttttctgagacagggtttggttctgtcacccaggctggagtgcagtagtgtgatctcggctcactgcaacctccacctcccggactcaagccatcctcctacctcatcctcctgagtagttgggactacaggggcatgtgccaccattcctagcaaatttctgtatttttggtagacatggggtttcaccatgttgtccaggctggtctcaaacccctgagctcaagtgattcgcataccttggcttcccaaagtactgggattataggtatgagccactatacccagcctaaagttccttcttgaaattgaaaaatcctgatataacattgatccaggaaaatgatcattcccgtgtactcaggtgtgtgtgtggtgtgtatgtgtgtgtttgtatgtatatttatgagtgtatatatgtactttctttttcagaaaagtgttttgaacctttagcaatcatgaatgtcaatcaaagctgactcaagaagaaaaagaaaatccaaataaacctataacaagaaaagaaatttaatcagtaatcaaaaacctcccgacaaagcaaagcccaggaccagatggcttcactggtgaattctcccaaacatttaaagaagaattaataccaatccttttcaactcattctatgaagccagcatttttctggtaccaaagctagaccaagacattgccagaaaagataactacagaccaatacaaatgcatgaatatagaaagcaaaaattttcaaaaatgtactagcaaaccaaatctttttttttttttctttctttctttcttttttgagacagggtctcactctgtcactcaggctggagtgcagtggagcaatctcggctcactgcaacctctgcctcccgcgttcaagctattctcgtgcctcaaactcccgagtagctgggattacaggcatgcgccaccatgcccagctaatttttgtatttttagtagagacagggtttcaccatgttggccaggctagtcttgaactcctgacctcaagcagtctgcccatcttggcctcccaaagtgttgggattacaggcgtgagccactgcacccagccaccagcaaaccaaatctaacagcatattaaaatgattatataccatgatgaagtgggatttgtccaagaaatacaacagtggtttaacacatgaaaatcagggtaatacatcacattaatagaatgaaaaaaatcctcatatgatcatgtcacttgatgtaactgtaaaacccaacatgctttcattaaaaacaaaacaaaacaaaacccacccaacaaactagcaataaaagggaacagcctcaacgtgattaagggcacatgtgaaaaagcacaactaattcaatggtaaaagactgagagctggtccctttacatcaggaacaagacaaagatgcctgttctcgccacttctgttcaacatagtactggaagtcctagccagagcaatcaggaagaaaaagaaacagaaggcatccaaattaaaaaagaagaagtaaaactatctctgttcacagatgacatgatcctatatatagataaatcctaaaagatctacaaaaagcaactattagagttaatatacaaattcagcaaacctgcaggatacaagatcaacatacgtaactctatagtactgataatactccaataaggaaattaagaaaacaatttaatttgcaatagtatcaaaaataaaatattttggaataaactaaggagatgcatgactttacaatgaaaactacaaaacactgttgaaagaaatttagaagaccttaataaatgaaaaaccaccttgttttcataagttggaggatttaataagacagcggtactctcaaagtgagactgatttatagggtcaatataatccctatcaaaatcccaacagcctttttctgcagaaatggaaaagctgattctcaaattcatatggaatctcgagggacattgaatatgcaaaacaatcttggaggagtcacacttttcaatttcaaaacctactataaaactacagaaatcaaaatagtgtggtatcagcataagaataactatatggatcaatagaataaaattgagagtcaggaagtaaactctcacattcatggacaactgatattcaacaagggtggcaggaccatccaatggagaatgaccagttttttcaacataggtgctaaaagaactagatagtcacatgcagaagaatgaagttgaatccttattttacatcacatataaaaattaactcaaaatgaattaaagacctaaatataaaagctaaaattattaaaaccttaaaagaaaccataaaggtaatattcatgaccttggaattggaaatgatttctcagatatgtttctaaaagcacaagcaaccaaagaaaaattggacataataaaaattaaacatttttgtgcatcaaaggacactgtcaagagaataaaaacacacagaatgaatatttatatccacaataaataaatatatccagaatatatacagaatgaaagttgtagtgtttcctcagcaaaaatcactcttggtgcatagttctatgagttttgacaaatatatataacaatgtaaccaccactgtagtcaagatatagaacagctccatcactctagaaaatgtttctcatgctgctcctttatagtaaagccctccccaaaccccttacaccaaacaaccacggatctgttctccatccctgcagttttgccttttccacaatgtctttgtgctttacaggataatgtcatataaatggaatcatacagtgtgtagctaaagaatgtatgtagaatcacgcaatatgtagctaaagccactctattgtccctcacaattaataaatatttatgggaaaataaattttaaaaaagaatgaaagttgtagtgttgcctacaacaacaaaaaaacaattaaatttaaaaataggcaaattcaaatattgcatgtcctcacttataagtggaagccaaacaaagggtccacacggatataaagatggaaagaatagactccaaaagtggaaggatagaaggaaaggggaaagggcaaaaaggaagtgaaaaattacctattgggtacagtgttcagtatttgggtactgggtacactggaagccaaattcaccattatgcaatgtacccatgtaataaacatgcacatctactcccgagtctaaaataatttttttaaaaaacaggcaaaacattgaatagatatttctccagagcacatgaaaaaatactcaatatcattagtcattagggaagtgcaaatcagaaccaccttgagataccacttcatatctactaggatcatcataataaaaaaaatcggataacaagtgttggtgaggatgtggagaaattggaacctttgtacaatgttggtgaaaatgaaaaatggtgcagctgctatggtaatcagtttgacaattcctcaaaaagttaaacatagaattgtcatatgatccagaaatatcacttctaggtaaaaccaaaagaatggaaaacagggacccaaataaatacatgcacgcaaatattcaacgcagcacaatttacagtagccaaaaggtggaaacagttgacagctaaacaaaatgtggtgtgtccatacaattgaatattattcagctataaagggaatgaaatactggtacctgctacactgtggatgaaccttgaaaacactgtgttaagtcaatgaagccagtagcaaaatgtcatacgactccatctatatgaaacatccagaacaggtaaacctgtagaggcagacggttgacgagtggttaccaggggatgtggcaagggagaatggggagtgattgcttatgaggaggtggttttgttttggggtgatgaaatgtcttggaactagataaaggtgatggctgcccagcattgtatttgtcctaaatgccgttgtacaccttaaaatggttaatgtttaattttatgttatgtgaattttatctcaaaaaaagagaagggataaagattatctttgacaaacaaaaactaagagaattc
